(19) United States
(12) Patent Application Publication
(10) Pub. No.: US 2021/0147817 A1
(43) Pub. Date: May 20, 2021

(54) THERMOPHILIC DNA POLYMERASE MUTANTS

(71) Applicant: Thermo Fisher Scientific Baltics UAB, Carlsbad, CA (US)

(72) Inventors: Rasa SUKACKAITE, Vilnius (LT); Skaiste VALINSKYTE, Vilnius (LT)

(21) Appl. No.: 16/623,332

(22) PCT Filed: Jun. 25, 2018
(86) PCT No.: PCT/EP2018/066896

§ 371 Date: Dec. 16, 2019

Related U.S. Application Data
(60) Provisional application No. 62/524,730, filed on Jun. 26, 2017.

(51) Int. Cl. C12N 9/12

(52) U.S. Cl. CPC C12N 9/1252; C12Y 207/07007

(57) ABSTRACT

This disclosure relates to thermophilic family B DNA polymerases comprising a neutral amino acid residue at a certain position near the C-terminus of the catalytic domain, which corresponds to a position occupied by a basic amino acid residue in wild-type Pfu polymerase. The thermophilic family B DNA polymerases provided herein also comprise an N-terminal domain comprising a uracil-binding pocket that has been modified to reduce template uracil binding. Related uses, methods, and compositions are also provided. In some embodiments, the polymerases comprise a 3′-5′ exonuclease domain and/or a sequence non-specific dsDNA binding domain.

### RELATED APPLICATIONS

[0001] This application is a 371 U.S. National Phase Application of PCT/EP2018/066896 filed Jun. 25, 2018, which claims priority to and the benefit of U.S. Provisional Patent Application Ser. No. 62/524,730 filed Jun. 26, 2017, which applications are incorporated herein by reference in their entirety.

### SEQUENCE LISTING

[0002] The instant application contains a Sequence Listing which has been submitted electronically in ASCII format and is hereby incorporated by reference in its entirety. Said ASCII copy is identical to the sequence listing filed in the parent PCT application filed on Jun. 25, 2018.

### BACKGROUND OF THE DISCLOSURE

[0003] This disclosure relates to the field of thermophilic DNA polymerase mutants, including methods, uses, and compositions thereof.

[0004] Thermophilic DNA polymerases are commonly used in biotechnology and molecular biology applications, including nucleic acid synthesis techniques such as amplification (e.g., polymerase chain reaction, or PCR), which involves cycles of alternating denaturation and primer annealing and extension. Thermophilic DNA polymerases are resistant to inactivation by high temperatures and so are compatible with thermal denaturation steps. DNA polymerases comprise a catalytic domain that extends a 3′ terminus of a DNA strand in a template-dependent manner. DNA polymerases can also comprise an exonuclease domain, such as a 3′ to 5′ exonuclease domain. Such an exonuclease domain can reduce the frequency of misincorporation by removing mismatched nucleotides from the 3′ end of a nascent DNA strand. Certain artificial DNA polymerases further comprise a sequence non-specific double-stranded DNA (dsDNA) binding domain. The presence of this domain can improve performance of the enzyme with respect to various parameters, including processivity, sensitivity, and yield.

[0005] Nucleic acid amplification can permit rapid detection of a target nucleic acid sequence and/or provide sufficient quantities of a sample for further analysis or manipulation, such as sequencing, cloning, restriction digestion, hybridization, ligation, mutagenesis, recombination, etc. Two key parameters of amplification are sensitivity and yield. Improving the sensitivity reduces the minimum amount of a target needed to produce a detectable product. Improving the yield increases the amount of product that results from a reaction, or reduces the amount of time and/or reagents necessary to obtain a given amount of product.

[0006] Samples may be refractory to amplification or may decrease sensitivity and/or yield if they contain nucleic acid synthesis inhibitors, which may occur naturally in the sample or may be introduced during earlier sample processing steps. Examples of nucleic acid synthesis inhibitors include polyanions such as heparin or xylan; anionic detergents such as sodium dodecyl sulfate; and certain complex organic substances such as humic acid, collagen, heme and heme-containing proteins, bile salts, and the like. Thermophilic DNA polymerases with improved tolerance of such inhibitors would reduce the need for purification and other sample processing steps in advance of nucleic acid synthesis and reduce the frequency of unsatisfactory synthesis reactions.

[0007] Certain polymerases such as the family B polymerases, including Pyrococcus furiosus (Pfu) DNA polymerase (see Kennedy et al., “The Mechanistic Architecture of the Thermostable Pyrococcus furiosus Family B DNA Polymerase Motif A and its Interaction with dNTP Substrate,” Biochemistry 2009 Dec. 1; 48(47): 11161-11168. doi:10.1021/bi9010122) and related polymerases, may benefit from mutations that increase yield and/or sensitivity. In some instances, an A408S mutation has been introduced into family B polymerases in order to improve accuracy (i.e., reduced error rate or increased fidelity), but with a detrimental impact on yield and/or sensitivity. It would be desirable to provide variants of family B polymerases that have improved yield and/or sensitivity. Further, coupled with an A408S mutation, such variants may have improved yield and/or sensitivity and also improved fidelity. It would also be desirable to provide variants of such polymerases with improved inhibitor resistance. Such polymerases could be suitable for use with a broader spectrum of samples and/or could reduce the need for preprocessing in advance of nucleic acid synthesis reactions in which high fidelity is desirable, such as for cloning, sequencing, gene construction, site-directed mutagenesis, etc.

[0008] A feature of archaeal family B DNA polymerases is the ability to recognize and bind uracil bases in template DNA during the amplification reaction. The uracil-binding pocket in nature reduces the accumulation of mutations caused by cytosine deamination to uracil and subsequent G-C base pair transitions to A-T during DNA replication. The uracil binding pocket recognizes and binds uracil bases in the template strand, stopping the polymerase. In PCR, the uracil-binding property of archaeal family B polymerases may be disadvantageous and result in decreased DNA amplification yields and lowered sensitivity. Even trace amounts of uracil may decrease DNA amplification yields and lower the sensitivity in simple PCR, high-fidelity PCR, and particularly in long-range PCR, where long elongation times are required. Furthermore, in certain diagnostic methods, qPCR, RT-qPCR, and end-point PCR may be performed using dNTP mixtures in which dTTP is partially or fully replaced by dUTP. Uracil-DNA glycosylase treatment and subsequent heating of the samples is used to degrade the DNA containing uracil and prevent carryover contamination, a primary concern in diagnostic laboratories. A thermostable archaeal family B DNA polymerase with improved yield and/or sensitivity and/or fidelity, and in which termplate uracil binding is diminished or abolished would therefore be highly desirable.

[0009] The uracil-binding pocket is located in the N-terminal domain of archaeal family B DNA polymerases and comprises amino acids from two conserved regions of the archaeal DNA polymerases: Region A and Region B, which are separated by a less conserved region. In the archaeal polymerase from Pyrococcus furiosus, Region A comprises amino acids 1-40 and Region B comprises amino acids 78-130. Uracil binding is mediated by relatively inflexible main-chain atoms, consistent with the sizeable difference (greater than 2 orders of magnitude) in binding affinity for uracil- and non-uracil-containing DNA. The pocket also contains a relatively high proportion of prolines, which may impart additional rigidity. The C5-C6 edge of the bound uracil packs against Pro90, Pro36 and Phe116. Packing above and below uracil are the side chains of Va193 and Pro36, and Ile114 and Arg119, respectively. These amino acids show a high level of conservation, approaching 100%, emphasizing their structural and functional importance (Firbank, 2008, J. Mol. Biol. 381: 529-539).

[0010] Archaeal family B DNA polymerases with substitutions at position Pro36 have been shown to have reduced affinity for uracil as compared to the wild-type polymerase. P36A mutant of Pfu DNA polymerase was able to extend primers beyond template strand uracil, yielding a mixture of truncated and full-length products (Firbank 2008). P36L mutant of Sh1B DNA polymerase was shown to amplify DNA in the presence of higher concentrations of dUTP compared with the wild-type enzyme, while P36H showed the highest resistance by performing PCR in the reaction mixtures where dTTP was completely replaced by dUTP (Tubeleviciute, 2010, Protein Engineering Design & Selection 23: 589-597).

[0011] Thus, there are needs for thermophilic DNA polymerases having increased inhibitor tolerance and/or the capability to provide increased yield and/or sensitivity and/or fidelity, and in which template uracil binding is diminished or abolished. Provided herein are polymerases and related methods and compositions that can solve these needs and/or provide other benefits.

[0012] In some embodiments, the present disclosure provides thermophilic DNA polymerase mutants and methods of nucleic acid synthesis using thermophilic DNA polymerase mutants. In some embodiments, a thermophilic DNA polymerase comprising a family B polymerase N-terminal domain comprising a uracil-binding pocket and a family B polymerase catalytic domain is provided, the family B polymerase N-terminal domain comprising a uracil-binding pocket having an amino acid sequence in which the position corresponding to position 36 of SEQ ID NO: 1 is any amino acid other than P, and the family B polymerase catalytic domain having an amino acid sequence in which the position corresponding to position 762 of SEQ ID NO: 1 is a neutral amino acid residue. In some embodiments, the position corresponding to position 36 of SEQ ID NO: 1 is selected from Q, N, H, S, T, Y, C, M, W, A, I, L, F, V, and G. In some embodiments, the position corresponding to position 36 of SEQ ID NO: 1 is H. In some embodiments, the position corresponding to position 762 of SEQ ID NO: 1 is selected from Q, N, H, S, T, Y, C, M, W, A, I, L, F, V, P, and G. In some embodiments, the position corresponding to position 762 of SEQ ID NO: 1 is selected from Q and N.

[0013] In some embodiments, the family B polymerase catalytic domain has at least 80%, 85%, 90%, 95%, 98%, 99%, or 100% identity to the family B polymerase catalytic domain sequence of a sequence selected from SEQ ID NOs: 6 to 10, 15 to 18, 25, 26, 33, 34, 37, 38, 41, 42, and 45 to 48, wherein X is the neutral amino acid residue and is selected from Q, N, H, S, T, Y, C, M, W, A, I, L, F, V, P, and G. In some embodiments, X is N or G.

[0014] In some embodiments, a thermophilic DNA polymerase is provided, wherein the family B polymerase N-terminal domain comprising a uracil-binding pocket has at least 80%, 85%, 90%, 95%, 98%, 99%, or 100% identity to the family B polymerase N-terminal domain comprising a uracil-binding pocket sequence of a sequence selected from SEQ ID NOs: 115 to 121 and 162 to 168, wherein X¹ is any amino acid other than P. In some embodiments, X¹ is selected from Q, N, H, S, T, Y, C, M, W, A, I, L, F, V, and G. In some embodiments, X¹ is H.

[0015] In some embodiments, a thermophilic DNA polymerase is provided, comprising a family B polymerase N-terminal domain comprising a uracil-binding pocket and a family B polymerase catalytic domain, wherein the amino acid residue at the position of the amino acid sequence that aligns to position 36 of SEQ ID NO: 1 is any amino acid other than P, and wherein the amino acid residue at the position of the amino acid sequence that aligns to position 762 of SEQ ID NO: 1 is a neutral amino acid residue. In some embodiments, the amino acid residue at the position of the amino acid sequence that aligns to position 36 of SEQ ID NO: 1 is selected from Q, N, H, S, T, Y, C, M, W, A, I, L, F, V, and G. In some embodiments, the amino acid residue at the position of the amino acid sequence that aligns to position 36 of SEQ ID NO: 1 is H. In some embodiments, the amino acid residue at the position of the amino acid sequence that aligns to position 762 of SEQ ID NO: 1 is selected from Q, N, H, S, T, Y, C, M, W, A, I, L, F, V, P, and G. in some embodiments, the amino acid residue at the position of the amino acid sequence that aligns to position 762 of SEQ ID NO: 1 is selected from Q and N.

[0016] In some embodiments, the family B polymerase catalytic domain has at least 80%, 85%, 90%, 95%, 98%, 99%, or 100% identity to SEQ ID NO: 6. In some embodiments, the family B polymerase N-terminal domain comprising a uracil-binding pocket has at least 80%, 85%, 90%, 95%, 98%, 99%, or 100% identity to a sequence selected from SEQ ID NOs: 115 to 121 and 162 to 168, wherein X¹ is any amino acid other than P. In some embodiments, X¹ is selected from Q, N, H, S, T, Y, C, M, W, A, I, L, F, V, and G. In some embodiments, X¹ is H.

[0017] In some embodiments, the amino acid residue at the position of the amino acid sequence that corresponds to position 408 of SEQ ID NO: 1 is a serine.

[0018] In some embodiments, the family B polymerase N-terminal domain comprising a uracil-binding pocket comprises a consecutive amino acid sequence of RHYIY (SEQ ID NO: 177), QHYIY (SEQ ID NO: 178), EHYIY (SEQ ID NO: 179), EHYFY (SEQ ID NO: 180), or RHYFY (SEQ ID NO: 181), and the family B polymerase catalytic domain comprises a consecutive amino acid sequence of WQKTX (SEQ ID NO: 182), XQTGL (SEQ ID NO: 183), KTXQT (SEQ ID NO: 184), YQKTX (SEQ ID NO: 185), XQVGL (SEQ ID NO: 186), KTXQV (SEQ ID NO: 187), YQSSX (SEQ ID NO: 188), XQTGL (SEQ ID NO: 183), SSXQT (SEQ ID NO: 189), TGRVX (SEQ ID NO: 190), XKSLL (SEQ ID NO: 191), RVXKS (SEQ ID NO: 192), TGRSX (SEQ ID NO: 193), XRTLL (SEQ ID NO: 194), or RSXRT (SEQ ID NO: 195);

wherein X is a neutral amino acid residue; and wherein X is within 20 residues of the C-terminus of the family B polymerase catalytic domain. In some embodiments, the family B polymerase catalytic domain is a subfamily B3 polymerase domain. In some embodiments, the neutral amino acid residue is a polar neutral amino acid residue. In some embodiments, the neutral amino acid residue comprises an amide. In some embodiments, the neutral amino acid residue is selected from Q, N, H, S, T, Y, C, M, W, A, I, L, F, V, P, and G. In some embodiments, the neutral amino acid residue is selected from Q and N. In some embodiments, the neutral amino acid residue is Q.

[0019] In some embodiments, the thermophilic DNA polymerase comprises a sequence non-specific double-stranded DNA-binding domain. In some embodiments, the sequence non-specific double-stranded DNA-binding domain comprises an amino acid sequence having at least 75%, 80%, 85%, 90%, 95%, 98%, 99%, or 100% identity to a sequence selected from SEQ ID NOs: 53 to 62. In some embodiments, the sequence non-specific double-stranded DNA-binding domain is C-terminal to the family B polymerase catalytic domain. In some embodiments, the sequence non-specific double-stranded DNA-binding domain is a 7 kD DNA-binding domain. In some embodiments, the sequence non-specific double-stranded DNA-binding domain is an Sso7d, Sac7d, or Sac7e domain.

[0020] In some embodiments, the thermophilic DNA polymerase comprises: (a) the consecutive amino acid residues LDFRS (SEQ ID NO: 196), (b) the consecutive amino acid residues FRSLY (SEQ ID NO: 197), or (c) the consecutive amino acid residues SLYPS (SEQ ID NO: 198), wherein the underlined serine residue is within 30 amino acid residues of the N-terminus of the family B polymerase catalytic domain.

[0021] In some embodiments, the thermophilic DNA polymerase comprises a 3′ to 5′ exonuclease domain. In some embodiments, the 3′ to 5′ exonuclease domain is N-terminal to the family B polymerase catalytic domain. In some embodiments, the 3′ to 5′ exonuclease domain is a DEDDy archaeal exonuclease domain. In some embodiments, the 3′ to 5′ exonuclease domain comprises an amino acid sequence having at least 90%, 95%, 98%, 99%, or 100% identity to SEQ ID NO: 63. In some embodiments, the 3′ to 5′ exonuclease domain comprises an amino acid sequence having at least 90%, 95%, 98%, 99%, or 100% identity to the 3′ to 5′ exonuclease domain of a sequence selected from SEQ ID NOs: 1, 19, 23, 31, 35, 39, 43, 49, 51, 52, 76 to 79, 92, 96, 102, 104, 106, 108, 110, 112, and 113, 139, 143, 149, 151, 155, 157, 159, and 160.

[0022] In some embodiments, the thermophilic DNA polymerase comprises an amino acid sequence having at least 90%, 95%, 98%, 99%, or 100% identity to a sequence selected from SEQ ID NOs: 80 to 113 and 127 to 160, wherein X¹ is any amino acid other than P and X² is the neutral amino acid residue. In some embodiments, X¹ is selected from Q, N, H, S, T, Y, C, M, W, A, I, L, F, V, G. In some embodiments, X¹ is H. In some embodiments, X² is selected from Q, N, H, S, T, Y, C, M, W, A, I, L, F, V, P, and G. In some embodiments, X² is N or G.

[0023] In some embodiments, the thermophilic DNA polymerase comprises an amino acid sequence comprising (i) at least one difference at a position corresponding to position 15, 72, 93, 141, 143, 247, 265, 337, 385, 387, 388, 399, 400, 405, 407, 410, 485, 542, 546, 593, or 595 of SEQ ID NO: 1 or (ii) at least one missing residue corresponding to position 92, 93, 94, or 381 of SEQ ID NO: 1. In some embodiments, the at least one mismatch or missing residue comprises at least one of:

(i) a missing residue corresponding to position 92 or 94 of SEQ ID NO: 1;
(ii) a Q or R at the position corresponding to position 93 of SEQ ID NO: 1;
(iii) an A at the position corresponding to position 141 of SEQ ID NO: 1;
(iv) an A at the position corresponding to position 143 of SEQ ID NO: 1;
(v) an I at the position corresponding to position 337 of SEQ ID NO: 1;
(vi) a Q, S, N, L, or H at the position corresponding to position 385 of SEQ ID NO: 1;
(vii) a P or S at the position corresponding to position 387 of SEQ ID NO: 1;
(viii) a P at the position corresponding to position 388 of SEQ ID NO: 1;
(ix) a D at the position corresponding to position 399 of SEQ ID NO: 1;
(x) a G or D at the position corresponding to position 400 of SEQ ID NO: 1;
(xi) an E at the position corresponding to position 405 of SEQ ID NO: 1;
(xii) an I at the position corresponding to position 407 of SEQ ID NO: 1;
(xiii) an L or F at the position corresponding to position 410 of SEQ ID NO: 1;
(xiv) a T at the position corresponding to position 485 of SEQ ID NO: 1;
(xv) a P at the position corresponding to position 542 of SEQ ID NO: 1;
(xvi) an H at the position corresponding to position 546 of SEQ ID NO: 1;
(xvii) a T at the position corresponding to position 593 of SEQ ID NO: 1; or
(xviii) an S at the position corresponding to position 595 of SEQ ID NO: 1.

[0024] In some embodiments, the thermophilic DNA polymerase has at least one of the following properties:

(i) capable of amplifying a 2 kb target from 40 ng of human genomic DNA template in the presence of 0.2 μM heparin in a PCR; and/or
(ii) capable of amplifying a 2 kb target from 40 ng of human genomic DNA template in the presence of 400 ng/μl xylan in a PCR;
wherein amplification is successful if product is detectable by agarose gel electrophoresis and ethidium bromide staining within 30 PCR cycles.

[0025] In some embodiments, the thermophilic DNA polymerase is capable of amplifying a 2 kb target from 200 ng of human genomic DNA in the presence of at least 100 μM, at least 120 μM, at least 140 μM, at least 160 μM, at least 180 μM, or at least 200 μM dUTP, wherein amplification is successful if product is detectable by agarose gel electrophoresis and ethidium bromide staining within 30 PCR cycles.

[0026] In some embodiments, the thermophilic DNA polymerase is bound to a thermolabile inhibitor. In some embodiments, the thermolabile inhibitor comprises an antibody, an Affibody®, an oligonucleotide, such as an aptamer, and/or a chemical modification.

[0027] In some embodiments, a method of in vitro nucleic acid synthesis is provided, comprising contacting at least one primer and at least one template with a thermophilic DNA polymerase provided herein in the presence of at least one dNTP. In some embodiments, the thermophilic DNA polymerase is initially bound to a thermolabile inhibitor and the method comprises denaturing the inhibitor. In some embodiments, the method further comprises amplification of the template. In some embodiments, the amplification comprises a PCR.

[0028] In some embodiments, a nucleic acid comprising a sequence encoding a thermophilic DNA polymerase described herein is provided. In some embodiments, an expression vector comprising the nucleic acid is provided. In some embodiments, an isolated host cell comprising the nucleic acid or the expression vector is provided. In some embodiments, a method of producing a thermophilic DNA polymerase described herein is provided, comprising culturing at least one host cell comprising a nucleic acid encoding the thermophilic DNA polymerase, wherein the at least one host cell expresses the thermophilic DNA polymerase. In some embodiments, the method further comprises isolating the thermophilic DNA polymerase.

[0029] In some embodiments, compositions comprising thermophilic DNA polymerases described herein are provided. In some embodiments, the composition comprises at least one hot start inhibitor. In some embodiments, the composition comprises at least two hot start inhibitors. In some embodiments, each hot start inhibitor is independently selected from an antibody, an Affibody®, an oligonucleotide and/or a chemical modification. In some embodiments, the composition comprises at least two antibodies. In some embodiments, the composition comprises an antibody and an oligonucleotide. In some embodiments, the oligonucleotide is an aptamer. In some embodiments, the composition comprises at least one antibody, and an Affibody® or an aptamer.

[0030] In some embodiments, the composition is a storage composition. In some embodiments, the composition comprises at least one protein stabilizer. In some embodiments, the protein stabilizer is selected from BSA, inactive polymerase, and apotransferrin. In some embodiments, the composition comprises a UTPase. In some embodiments, the composition comprises at least one buffering agent. In some embodiments, the buffering agent is selected from acetate buffer, sulfate buffer, phosphate buffer, MOPS, HEPES and Tris-(hydroxymethyl)aminomethane (TRIS). In some embodiments, the composition comprises at least one monovalent cationic salt. In some embodiments, the monovalent cationic salt is selected from KCl and NaCl. In some embodiments, the composition comprises at least one stabilizer. In some embodiments, the stabilizer is selected from glycerol, trehalose, lactose, maltose, galactose, glucose, sucrose, dimethyl sulfoxide (DMSO), polyethylene glycol, and sorbitol. In some embodiments, the composition comprises at least one reducing agent. In some embodiments, the reducing agent is dithiothreitol (DTT). In some embodiments, the composition comprises at least one divalent chelating agent. In some embodiments, the divalent chelating agent is EDTA. In some embodiments, the composition comprises at least one detergent. In some embodiments, the detergent is anionic. In some embodiments, the detergent is cationic. In some embodiments, the detergent is non-ionic. In some embodiments, the detergent is zwitterionic. In some embodiments, the composition comprises a detergent selected from Hecameg (6-O—(N-Heptylcarbamoyl)-methyl-α-D-glucopyranoside), Triton X-200, Brij-58, CHAPS, n-Dodecyl-b-D-maltoside, NP-40, sodium dodecyl sulphate (SDS), TRITON® X-15, TRITON® X-35, TRITON® X-45, TRITON® X-100, TRITON® X-102, TRITON® X-114, TRITON® X-165, TRITON® X-305, TRITON® X-405, TRITON® X-705, Tween® 20 and/or ZWITTERGENT®.

[0031] In some embodiments, the composition is an aqueous solution. In some embodiments, the composition is a lyophilized composition.

[0032] In some embodiments, the composition is a reaction composition. In some embodiments, the composition comprises at least one buffering agent. In some embodiments, the buffering agent is selected from acetate buffer, sulfate buffer, phosphate buffer, MOPS, HEPES and Tris-(hydroxymethyl)aminomethane (TRIS). In some embodiments, the composition comprises at least one monovalent cationic salt. In some embodiments, the monovalent cationic salt is selected from KCl and NaCl. In some embodiments, the composition comprises at least one divalent cationic salt. In some embodiments, the divalent cationic salt is MgCl₂ or MnCl₂. In some embodiments, the composition comprises at least one detergent. In some embodiments, the detergent is anionic. In some embodiments, the detergent is cationic. In some embodiments, the detergent is non-ionic. In some embodiments, the detergent is zwitterionic. In some embodiments, the composition comprises a detergent selected from Hecameg (6-O—(N-Heptylcarbamoyl)-methyl-α-D-glucopyranoside), Triton X-200, Brij-58, CHAPS, n-Dodecyl-b-D-maltoside, NP-40, sodium dodecyl sulphate (SDS), TRITON® X-15, TRITON® X-35, TRITON® X-45, TRITON® X-100, TRITON® X-102, TRITON® X-114, TRITON® X-165, TRITON® X-305, TRITON® X-405, TRITON® X-705, Tween® 20 and/or ZWITTERGENT®. In some embodiments, the composition comprises at least one dNTP. In some embodiments, the composition comprises dATP, dGTP, dTTP, and dCTP. In some embodiments, the composition further comprises glycerol, DMSO, and/or ammonium sulphate. In some embodiments, the composition comprises at least one dye. In some embodiments, the composition comprises at least one dye selected from xylene cyanol FF, tartrazine, phenol red, quinoline yellow, zylene cyanol, Brilliant Blue, Patent Blue, indigocarmine, acid red 1, m-cresol purple, cresol red, neutral red, bromocresol green, acid violet 5, bromo phenol blue, and orange G. In some embodiments, the composition comprises at least one agent that increases the density of the composition. In some embodiments, the composition comprises at least one agent selected from PEG 4000 and/or sucrose. In some embodiments, the composition comprises at least one primer. In some embodiments, the composition comprises at least one nucleic acid template.

### BRIEF DESCRIPTION OF THE DRAWINGS

[0033] FIG. 1 shows a comparison of PCR amplifications in which heparin was present at a series of concentrations from 0 to 0.3 μM and in which the polymerase comprised a family B thermophilic DNA polymerase catalytic domain with (“762Q”) or without (“762K”) a neutral amino acid residue at the position that aligns to position 762 of Pfu (SEQ ID NO: 1; aligning to position 379 of the Pfu catalytic domain (SEQ ID NO: 6)) and with (“408S”) or without (no 408 designation) a serine at the position that aligns to position 762 of Pfu (SEQ ID NO: 1; aligning to position 25 of the Pfu catalytic domain (SEQ ID NO: 6)).

[0034] FIG. 2 shows a comparison of PCR amplifications in which xylan was present at a series of concentrations from 0 to 400 ng/μl and in which the polymerase comprised a family B thermophilic DNA polymerase catalytic domain with (“762Q”) or without (“762K”) a neutral amino acid residue at the position that aligns to position 762 of Pfu (SEQ ID NO: 1; aligning to position 379 of the Pfu catalytic domain (SEQ ID NO: 6)) and with (“408S”) or without (no 408 designation) a serine at the position that aligns to position 762 of Pfu (SEQ ID NO: 1; aligning to position 25 of the Pfu catalytic domain (SEQ ID NO: 6)).

[0035] FIG. 3 shows a comparison of PCR amplifications in which humic acid was present at a series of concentrations from 0 to 1 ng/μl and in which the polymerase comprised a family B thermophilic DNA polymerase catalytic domain with (“762Q”) or without (“762K”) a neutral amino acid residue at the position that aligns to position 762 of Pfu (SEQ ID NO: 1; aligning to position 379 of the Pfu catalytic domain (SEQ ID NO: 6)).

[0036] FIG. 4 shows a comparison of PCR amplifications in which sodium dodecyl sulfate (“SDS”) was present at a series of concentrations from 0 to 0.016% or 0.2% (w/v) and in which the polymerase comprised a family B thermophilic DNA polymerase catalytic domain with (“762Q”) or without (“762K”) a neutral amino acid residue at the position that aligns to position 762 of Pfu (SEQ ID NO: 1; aligning to position 379 of the Pfu catalytic domain (SEQ ID NO: 6)).

[0037] FIG. 5 shows a comparison of PCR amplifications in which a 2 kb fragment was amplified from a series of amounts of human genomic DNA template between 0 and 400 ng in a 20 μl PCR mixture using a polymerase comprising a family B thermophilic DNA polymerase catalytic domain with (“762Q”) or without (“762K”) a neutral amino acid residue at the position that aligns to position 762 of Pfu (SEQ ID NO: 1; aligning to position 379 of the Pfu catalytic domain (SEQ ID NO: 6)) and with (“408S”) or without (no 408 designation) a serine at the position that aligns to position 762 of Pfu (SEQ ID NO: 1; aligning to position 25 of the Pfu catalytic domain (SEQ ID NO: 6)).

[0038] FIG. 6A shows a comparison of PCR amplifications in which a 10 kb fragment was amplified from a series of amounts of bacteriophage lambda DNA template between 0 and 200 ng in a 20 μl PCR mixture using a polymerase comprising a family B thermophilic DNA polymerase catalytic domain with (“762Q”) or without (“762K”) a neutral amino acid residue at the position that aligns to position 762 of Pfu (SEQ ID NO: 1; aligning to position 379 of the Pfu catalytic domain (SEQ ID NO: 6)) and with (“408S”) or without (no 408 designation) a serine at the position that aligns to position 762 of Pfu (SEQ ID NO: 1; aligning to position 25 of the Pfu catalytic domain (SEQ ID NO: 6)).

[0039] FIG. 6B shows a bar graph illustrating yield from amplification of a 10 kb fragment from a series of amounts of bacteriophage lambda DNA template using a polymerase comprising a family B thermophilic DNA polymerase catalytic domain with (“762Q”) or without (“762K”) a neutral amino acid residue at the position that aligns to position 762 of Pfu (SEQ ID NO: 1; aligning to position 379 of the Pfu catalytic domain (SEQ ID NO: 6)) and with (“408S”) or without (no 408 designation) a serine at the position that aligns to position 762 of Pfu (SEQ ID NO: 1; aligning to position 25 of the Pfu catalytic domain (SEQ ID NO: 6)).

[0040] FIG. 7A shows a comparison of PCR amplifications of a 2 kb product in which human genomic DNA template was present at a series of amounts from 0 to 400 ng in a reaction volume of 20 μl and in which the polymerase comprised a family B thermophilic DNA polymerase catalytic domain without (“408S 762K”) or with (“408S 762Q”) a neutral amino acid residue at the position that aligns to position 762 of Pfu (SEQ ID NO: 1; aligning to position 379 of the Pfu catalytic domain (SEQ ID NO: 6)) and with a serine at the position that aligns to position 762 of Pfu (SEQ ID NO: 1; aligning to position 25 of the Pfu catalytic domain (SEQ ID NO: 6)).

[0041] FIG. 7B shows a comparison of PCR amplifications of a 5 kb product in which bacteriophage lambda DNA template was present at a series of amounts from 0 to 200 ng in a reaction volume of 20 μl and in which the polymerase comprised a family B thermophilic DNA polymerase catalytic domain without (“408S 762K”) or with (“408S 762Q”) a neutral amino acid residue at the position that aligns to position 762 of Pfu (SEQ ID NO: 1; aligning to position 379 of the Pfu catalytic domain (SEQ ID NO: 6)) and with a serine at the position that aligns to position 762 of Pfu (SEQ ID NO: 1; aligning to position 25 of the Pfu catalytic domain (SEQ ID NO: 6)).

[0042] FIG. 8 shows a comparison of PCR amplifications of a 20 kb product in which bacteriophage lambda DNA template was present at a series of amounts from 0 to 100 ng in a reaction volume of 20 μl and in which the polymerase comprised a family B thermophilic DNA polymerase catalytic domain without (“408S 762K”) or with (“408S 762Q”) a neutral amino acid residue at the position that aligns to position 762 of Pfu (SEQ ID NO: 1; aligning to position 379 of the Pfu catalytic domain (SEQ ID NO: 6)) and with a serine at the position that aligns to position 762 of Pfu (SEQ ID NO: 1; aligning to position 25 of the Pfu catalytic domain (SEQ ID NO: 6)).

[0043] FIG. 9 shows a comparison of PCR amplifications of a 20 kb product in which Escherichia coli genomic DNA template was present at a series of amounts from 0 to 40 ng in a reaction volume of 20 μl and in which the polymerase comprised a family B thermophilic DNA polymerase catalytic domain without (“408S 762K”) or with (“408S 762Q”) a neutral amino acid residue at the position that aligns to position 762 of Pfu (SEQ ID NO: 1; aligning to position 379 of the Pfu catalytic domain (SEQ ID NO: 6)) and with a serine at the position that aligns to position 762 of Pfu (SEQ ID NO: 1; aligning to position 25 of the Pfu catalytic domain (SEQ ID NO: 6)).

[0044] FIG. 10 shows a comparison of PCR amplifications of a 7.5 kb product in which human genomic DNA template was present at a series of amounts from 0 to 400 ng in a reaction volume of 20 μl and in which the polymerase comprised a family B thermophilic DNA polymerase catalytic domain without (“408S 762K”) or with (“408S 762Q”) a neutral amino acid residue at the position that aligns to position 762 of Pfu (SEQ ID NO: 1; aligning to position 379 of the Pfu catalytic domain (SEQ ID NO: 6)) and with a serine at the position that aligns to position 762 of Pfu (SEQ ID NO: 1; aligning to position 25 of the Pfu catalytic domain (SEQ ID NO: 6)).

[0045] FIGS. 11A through 11B show a multiple amino acid sequence alignment of Thermococcus litoralis (“Tli”; SEQ ID NO: 31), (“Tsp9N7”; SEQ ID NO: 49), Thermococcus gorgonarius (“Tgo”; SEQ ID NO: 39), Thermococcus kodakarensis (“Tko”; SEQ ID NO: 43), Pyrococcus furiosus (“Pfu”; SEQ ID NO: 2), and Deep Vent (“DP”; SEQ ID NO: 23) polymerases, in which the position corresponding to position 36 of Pfu (SEQ ID NO: 1) is marked with a percent (%), the position corresponding to position 408 of Pfu (SEQ ID NO: 1) is marked with an asterisk (*) and the position corresponding to position 762 of Pfu (SEQ ID NO: 1) is marked with a pound (#). The position corresponding to position 762 of Pfu is indicated as “X” in each amino acid sequence of the sequence alignment. X may be selected from Q, N, H, S, T, Y, C, M, W, A, I, L, F, V, P, and G; in some embodiments, X is selected from Q and N. In some embodiments, X is Q.

[0046] FIG. 12 shows a multiple amino acid sequence alignment of the catalytic domains of Thermococcus litoralis (“Tli”; SEQ ID NO: 33), (“Tsp9N7”; SEQ ID NO: 47), Thermococcus gorgonarius (“Tgo”; SEQ ID NO: 41), Thermococcus kodakarensis (“Tko”; SEQ ID NO: 45), Pyrococcus furiosus (“Pfu”; SEQ ID NO: 7), and Deep Vent (“DP”; SEQ ID NO: 25) polymerases, in which the position corresponding to position 408 of Pfu in the full-length polymerase (SEQ ID NO: 1; corresponding to position 25 of the Pfu catalytic domain (SEQ ID NO: 6)) is marked with an asterisk (*) and position corresponding to position 762 of Pfu in the full-length polymerase (SEQ ID NO: 1; corresponding to position 379 in the Pfu catalytic domain (SEQ ID NO: 6)) is marked with a pound (#). The position corresponding to position 762 of Pfu (SEQ ID NO: 1; position 379 in the Pfu catalytic domain (SEQ ID NO: 6)) is indicated as “X” in the sequence alignment. X may be selected from Q, N, H, S, T, Y, C, M, W, A, I, L, F, V, P, and G; in some embodiments, X is selected from Q and N. In some embodiments, X is Q.

[0047] FIG. 13 shows amplification of a 2 kb human genomic DNA product by a 36H 408S 762Q polymerase in the presence increasing replacement of dTTP with dUTP.

[0048] FIG. 14 shows amplification of a 5 kb human genomic DNA product by a 36H 408S 762Q polymerase in the presence increasing replacement of dTTP with dUTP.

[0049] FIG. 15 shows amplification of a 2 kb human genomic DNA product by a 36H 408S 762Q polymerase and 36H polymerase in the presence of added dUTP

[0050] FIG. 16 shows multiplex amplification of human genomic DNA with 4 or 5 primer pairs.

### DETAILED DESCRIPTION

[0051] This description and exemplary embodiments should not be taken as limiting. For the purposes of this specification and appended claims, unless otherwise indicated, all numbers expressing quantities, percentages, or proportions, and other numerical values used in the specification and claims, are to be understood as being modified in all instances by the term “about,” to the extent they are not already so modified. Accordingly, unless indicated to the contrary, the numerical parameters set forth in the following specification and attached claims are approximations that may vary depending upon the desired properties sought to be obtained. At the very least, and not as an attempt to limit the application of the doctrine of equivalents to the scope of the claims, each numerical parameter should at least be construed in light of the number of reported significant digits and by applying ordinary rounding techniques.

[0052] It is noted that, as used in this specification and the appended claims, the singular forms “a,” “an,” and “the,” and any singular use of any word, include plural referents unless expressly and unequivocally limited to one referent. As used herein, the term “include” and its grammatical variants are intended to be non-limiting, such that recitation of items in a list is not to the exclusion of other like items that can be substituted or added to the listed items.

[0053] The term “nucleic acid synthesis” refers to template-directed synthesis of a nucleic acid strand using a polymerase enzyme. Nucleic acid synthesis includes all such template-directed nucleic acid synthesis by a polymerase, including, but not limited to, amplification, PCR, end point PCR (epPCR), real time or quantitative PCR (qPCR), one-step RT-PCR, sequencing, etc.

[0054] As used herein the terms “amplify”, “amplifying”, “amplification” and other related terms include producing multiple copies of an original biomolecule, such as a nucleic acid. In some embodiments, nucleic acid amplification produces multiple copies of an original nucleic acid and/or its complement (e.g., target nucleic acid, also referred to as a target polynucleotide), where the copies comprise at least a portion of the template sequence and/or its complement. Such copies may be single-stranded or double-stranded.

[0055] A “template” or “template nucleic acid” or “template polynucleotide” refers to a polynucleotide that comprises the polynucleotide sequence to be amplified. In some embodiments, the polynucleotide sequence to be amplified is flanked by primer hybridization sites, such as a hybridization site for a 5′ primer (or the complement thereof) and a hybridization site for a 3′ primer (or the complement thereof). A template may comprise RNA and/or DNA, and may be from a natural source, or be synthetic. Nonlimiting exemplary templates include genomic DNA, viral DNA, mitochondrial DNA, viral RNA, mRNA, tRNA, microRNA, plasmids, vectors, cosmids, artificial chromosomes, etc. Any polynucleotide that may be copied or amplified by a polymerase enzyme is considered a template.

[0056] “Domain” refers to a unit of a protein or protein complex, comprising a polypeptide subsequence, a complete polypeptide sequence, or a plurality of polypeptide sequences where that unit has a defined function. The function is understood to be broadly defined and can be ligand binding, catalytic activity, and/or can have a stabilizing effect on the structure of the protein.

[0057] Residues “correspond” to each other where they occur at equivalent positions in aligned amino acid sequences, such as family B thermophilic polymerase sequences and/or a domain thereof, such as a uracil-binding pocket, catalytic domain, or exonuclease domain. Corresponding positions can be identified as positions that align with one another. Related or variant polypeptides are aligned by any method in the art. Such methods typically maximize matches, and include methods such as using manual alignments and by using any of the numerous alignment programs available (for example, BLASTP) and others known in the art. By aligning the sequences of polypeptides, one of skill in the art can identify corresponding residues, using conserved and identical amino acid residues as guides. In some embodiments, an amino acid of a polypeptide is considered to correspond to an amino acid in a disclosed sequence when the amino acid of the polypeptide is aligned with the amino acid in the disclosed sequence upon alignment of the polypeptide with the disclosed sequence to maximize identity and homology (e.g., where conserved amino acids are aligned) using a standard alignment algorithm, such as the BLASTP algorithm with default scoring parameters (such as, for example, BLOSUM62 Matrix, Gap existence penalty 11, Gap extension penalty 1, and with default general parameters). As a non-limiting example, with reference to the multiple sequence alignment shown in FIGS. 11A-C, amino acid residue 408 in SEQ ID NO: 9 corresponds to positions 410, 407, 407, 407, and 408 in SEQ ID NOs: 52, 57, 55, 56, and 51, respectively (marked with an asterisk in FIG. 11A). As another non-limiting example, amino acid residue 762 in SEQ ID NO: 9 corresponds to positions 764, 761, 761, 761, and 762 in SEQ ID NOs: 52, 57, 55, 56, and 51, respectively (marked with a pound in FIG. 11B). As another non-limiting example, amino acid residue 36 in SEQ ID NO: 9 corresponds to position 36 in SEQ ID NOs: 52, 57, 55, 56, and 51 (marked with a percent in FIG. 11B). In some embodiments, corresponding positions can also be identified using overlaid 3-D structures, where available, as positions at which greater than 50% of the volume occupied by a space-filling model of an amino acid in a first polypeptide is occupied by the space-filling model of the corresponding amino acid in a second polypeptide.

[0058] “Identity” is measured by a score determined by comparing the amino acid sequences of the two polypeptides using the Bestfit program. Bestfit uses the local homology algorithm of Smith and Waterman, Advances in Applied Mathematics 2:482-489 (1981) to find the best segment of similarity between two sequences. When using Bestfit to determine whether a test amino acid sequence is, for instance, 95% identical to a reference sequence according to the present disclosure, the parameters are set so that the percentage of identity is calculated over the full length of the test amino acid sequence, such that 95% of the amino acids in the test amino acid sequence align with identical amino acids on the reference sequence.

[0059] “Sequence-non-specific DNA binding domain” or “DNA binding domain” refers to a protein domain that binds to DNA without significant sequence preference. In some embodiments, a DNA binding domain binds to double-stranded DNA. Non-limiting exemplary DNA binding domains include Sso7d from Sulfolobus solfataricus, Sac7d, Sac7a, Sac7b, and Sac7e from S. acidocaldarius, and Ssh7a and Ssh7b from Sulfolobus shibatae, Pae3192, Pae0384, and Ape3192, HMf family archaeal histone domains, and archaeal PCNA homolog.

[0060] With reference to two polypeptides or two polypeptide domains, the term “fused” means that the two polypeptides or polypeptide domains are contained in a single contiguous polypeptide sequence.

[0061] “Heterologous”, when used with reference to portions of a protein, indicates that the protein comprises two or more domains that are not found in the same relationship to each other in nature. In some embodiments, such a protein, e.g., a fusion protein, contains two or more domains from unrelated proteins arranged to make a new functional protein.

[0062] “Error-correcting activity” of a polymerase or polymerase domain refers to the 3′ to 5′ exonuclease proofreading activity of a polymerase whereby nucleotides that do not form Watson-Crick base pairs with the template are removed from the 3′ end of an oligonucleotide, i.e., a strand being synthesized from a template, in a sequential manner. Examples of polymerases that have error-correcting activity include polymerases from Pyrococcus furiosus, Thermococcus litoralis, and Thermotoga maritima with wild-type exonuclease domains, and certain others discussed herein.

[0063] “Sensitivity” as used herein, refers to the ability of a polymerase to amplify a target nucleic acid that is present at low copy number. In some embodiments, low copy number refers to a target nucleic acid that is present at fewer than 10,000 or fewer than 1,000 or fewer than 100 or fewer than 10 copies in the composition comprising the target nucleic acid and the polymerase.

[0064] “Specificity” as used herein, refers to the ability of a polymerase to amplify a target nucleic acid while producing fewer non-specific amplification byproducts, such as those resulting from primer-dimers.

[0065] As used herein the terms “hybridize”, “hybridizing”, “hybridization” and other related terms include hydrogen bonding between two different nucleic acids, or between two different regions of a nucleic acid, to form a duplex nucleic acid. Hybridization can comprise Watson-Crick or Hoogstein binding to form a duplex nucleic acid. The two different nucleic acids, or the two different regions of a nucleic acid, may be complementary, or partially complementary. The complementary base pairing can be the standard A-T or C-G base pairing, or can be other forms of base-pairing interactions. Duplex nucleic acids can include mismatched base-paired nucleotides. Complementary nucleic acid strands need not hybridize with each other across their entire length.

[0066] In some embodiments, conditions that are suitable for nucleic acid hybridization and/or nucleic acid synthesis include parameters such as salts, buffers, pH, temperature, % GC content of the polynucleotide and primers, and/or time. For example, conditions suitable for hybridizing nucleic acids (e.g., polynucleotides and primers) can include hybridization solutions having sodium salts, such as NaCl, sodium citrate and/or sodium phosphate. In some embodiments, a hybridization solution can be a stringent hybridization solution which can include any combination of formamide (e.g., about 50%), 5×SSC (e.g., about 0.75 M NaCl and about 0.075 M sodium citrate), sodium phosphate (e.g., about 50 mM at about pH 6.8), sodium pyrophosphate (e.g., about 0.1%), 5×Denhardt's solution, SDS (e.g., about 0.1%), and/or dextran sulfate (e.g., about 10%). In some embodiments, hybridization and/or nucleic acid synthesis can be conducted at a temperature range of about 45-55° C., or about 55-65° C., or about 65-75° C.

[0067] In some embodiments, hybridization or nucleic acid synthesis conditions can be conducted at a pH range of about 5-10, or about pH 6-9, or about pH 6.5-8, or about pH 6.5-7.

[0068] Thermal melting temperature (Tₘ) for nucleic acids can be a temperature at which half of the nucleic acid strands are double-stranded and half are single-stranded under a defined condition. In some embodiments, a defined condition can include ionic strength and pH in an aqueous reaction condition. A defined condition can be modulated by altering the concentration of salts (e.g., sodium), temperature, pH, buffers, and/or formamide. Typically, the calculated thermal melting temperature can be at about 5-30° C. below the Tₘ, or about 5-25° C. below the Tₘ, or about 5-20° C. below the Tₘ, or about 5-15° C. below the Tₘ, or about 5-10° C. below the Tₘ. Methods for calculating a Tₘ are well known and can be found in Sambrook (1989 in “Molecular Cloning: A Laboratory Manual”, 2n^{d} edition, volumes 1-3; Wetmur 1966, J. Mol. Biol., 31:349-370; Wetmur 1991 Critical Reviews in Biochemistry and Molecular Biology, 26:227-259). Other sources for calculating a Tₘ for hybridizing or denaturing nucleic acids include OligoAnalyze (from Integrated DNA Technologies) and Primer3 (distributed by the Whitehead Institute for Biomedical Research).

[0069] Provided herein are thermophilic DNA polymerases comprising a family B polymerase N-terminal domain comprising a uracil-binding pocket in which a proline is replaced with another amino acid, and a family B polymerase catalytic domain in which a neutral amino acid residue is present at a certain position. Many types of Family B polymerases are described in Rothwell and Watsman, Advances in Protein Chemistry 71:401-440 (2005). Examples of thermophilic Family B polymerases include those of the Pyrococcus and Thermococcus genera, such as the Deep Vent polymerase and Family B polymerases of P. furiosus, P. calidifontis, P. aerophilum, T. kodakarensis, T. gorgonarius, and Thermococcus sp. 9° N-7. Exemplary wild-type amino acid sequences for such thermophilic family B polymerases can be obtained from public databases such as NCBI GenBank or UniProt. Wild-type sequences include naturally-occurring variants of the amino acid sequences for such thermophilic family B polymerases can be obtained from public databases such as NCBI GenBank or UniProt. Note that in some cases, the sequences are annotated as containing inteins; the inteins are not present in the mature enzyme.

[0070] In some embodiments, the family B polymerase N-terminal domain comprising a uracil-binding pocket has an amino acid sequence in which the position corresponding to position 36 of SEQ ID NO: 1 is any amino acid other than P. In some embodiments, the family B polymerase N-terminal domain comprising a uracil-binding pocket has an amino acid sequence wherein the amino acid residue at the position of the amino acid sequence that aligns to position 36 of SEQ ID NO: 1 is any amino acid other than P. In some embodiments, the family B polymerase N-terminal domain comprising a uracil-binding pocket has at least 80%, 85%, 90%, 95%, 98%, 99%, or 100% identity to a sequence selected from SEQ ID NOs: 115 to 121 and 162 to 168, wherein the position corresponding to position 36 of SEQ ID NO: 1 is any amino acid other than P. In some embodiments, the family B polymerase N-terminal domain comprising a uracil-binding pocket has at least 80%, 85%, 90%, 95%, 98%, 99%, or 100% identity to SEQ ID NO: 115, wherein the position corresponding to position 36 of SEQ ID NO: 1 is any amino acid other than P. In some embodiments, the family B polymerase N-terminal domain comprising a uracil-binding pocket has at least 80%, 85%, 90%, 95%, 98%, 99%, or 100% identity to SEQ ID NO: 116, wherein the position corresponding to position 36 of SEQ ID NO: 1 is any amino acid other than P. In some embodiments, the family B polymerase N-terminal domain comprising a uracil-binding pocket has at least 80%, 85%, 90%, 95%, 98%, 99%, or 100% identity to SEQ ID NO: 117, wherein the position corresponding to position 36 of SEQ ID NO: 1 is any amino acid other than P. In some embodiments, the family B polymerase N-terminal domain comprising a uracil-binding pocket has at least 80%, 85%, 90%, 95%, 98%, 99%, or 100% identity to SEQ ID NO: 118, wherein the position corresponding to position 36 of SEQ ID NO: 1 is any amino acid other than P. In some embodiments, the family B polymerase N-terminal domain comprising a uracil-binding pocket has at least 80%, 85%, 90%, 95%, 98%, 99%, or 100% identity to SEQ ID NO: 119, wherein the position corresponding to position 36 of SEQ ID NO: 1 is any amino acid other than P. In some embodiments, the family B polymerase N-terminal domain comprising a uracil-binding pocket has at least 80%, 85%, 90%, 95%, 98%, 99%, or 100% identity to SEQ ID NO: 120, wherein the position corresponding to position 36 of SEQ ID NO: 1 is any amino acid other than P. In some embodiments, the family B polymerase N-terminal domain comprising a uracil-binding pocket has at least 80%, 85%, 90%, 95%, 98%, 99%, or 100% identity to SEQ ID NO: 121, wherein the position corresponding to position 36 of SEQ ID NO: 1 is any amino acid other than P. In some embodiments, the family B polymerase N-terminal domain comprising a uracil-binding pocket has at least 80%, 85%, 90%, 95%, 98%, 99%, or 100% identity to SEQ ID NO: 162, wherein the position corresponding to position 36 of SEQ ID NO: 1 is any amino acid other than P. In some embodiments, the family B polymerase N-terminal domain comprising a uracil-binding pocket has at least 80%, 85%, 90%, 95%, 98%, 99%, or 100% identity to SEQ ID NO: 163, wherein the position corresponding to position 36 of SEQ ID NO: 1 is any amino acid other than P. In some embodiments, the family B polymerase N-terminal domain comprising a uracil-binding pocket has at least 80%, 85%, 90%, 95%, 98%, 99%, or 100% identity to SEQ ID NO: 164, wherein the position corresponding to position 36 of SEQ ID NO: 1 is any amino acid other than P. In some embodiments, the family B polymerase N-terminal domain comprising a uracil-binding pocket has at least 80%, 85%, 90%, 95%, 98%, 99%, or 100% identity to SEQ ID NO: 165, wherein the position corresponding to position 36 of SEQ ID NO: 1 is any amino acid other than P. In some embodiments, the family B polymerase N-terminal domain comprising a uracil-binding pocket has at least 80%, 85%, 90%, 95%, 98%, 99%, or 100% identity to SEQ ID NO: 166, wherein the position corresponding to position 36 of SEQ ID NO: 1 is any amino acid other than P. In some embodiments, the family B polymerase N-terminal domain comprising a uracil-binding pocket has at least 80%, 85%, 90%, 95%, 98%, 99%, or 100% identity to SEQ ID NO: 167, wherein the position corresponding to position 36 of SEQ ID NO: 1 is any amino acid other than P. In some embodiments, the family B polymerase N-terminal domain comprising a uracil-binding pocket has at least 80%, 85%, 90%, 95%, 98%, 99%, or 100% identity to SEQ ID NO: 168, wherein the position corresponding to position 36 of SEQ ID NO: 1 is any amino acid other than P.

[0071] In some embodiments, the family B polymerase catalytic domain has an amino acid sequence in which the position corresponding to position 379 of SEQ ID NO: 6 is a neutral amino acid residue. In some embodiments, the family B polymerase catalytic domain has an amino acid sequence wherein the amino acid residue at the position of the amino acid sequence that aligns to position 379 of SEQ ID NO: 6 is a neutral amino acid residue. In some embodiments, the family B polymerase catalytic domain has at least 80%, 85%, 90%, 95%, 98%, 99%, or 100% identity to a sequence selected from SEQ ID NOs: 6 to 10, 15 to 18, 25, 26, 33, 34, 37, 38, 41, 42, and 45 to 48, wherein the position corresponding to position 379 of SEQ ID NO: 6 is a neutral amino acid residue. In some embodiments, the family B polymerase catalytic domain has at least 80%, 85%, 90%, 95%, 98%, 99%, or 100% identity to SEQ ID NO: 7, wherein the position corresponding to position 379 of SEQ ID NO: 6 is a neutral amino acid residue. In some embodiments, the family B polymerase catalytic domain has at least 80%, 85%, 90%, 95%, 98%, 99%, or 100% identity to the catalytic domain of SEQ ID NO: 15, wherein the position corresponding to position 379 of SEQ ID NO: 6 is a neutral amino acid residue. In some embodiments, the family B polymerase catalytic domain has at least 80%, 85%, 90%, 95%, 98%, 99%, or 100% identity to the catalytic domain of SEQ ID NO: 25, wherein the position corresponding to position 379 of SEQ ID NO: 6 is a neutral amino acid residue. In some embodiments, the family B polymerase catalytic domain has at least 80%, 85%, 90%, 95%, 98%, 99%, or 100% identity to the catalytic domain of SEQ ID NO: 33, wherein the position corresponding to position 379 of SEQ ID NO: 6 is a neutral amino acid residue. In some embodiments, the family B polymerase catalytic domain has at least 80%, 85%, 90%, 95%, 98%, 99%, or 100% identity to the catalytic domain of SEQ ID NO: 37, wherein the position corresponding to position 379 of SEQ ID NO: 6 is a neutral amino acid residue. In some embodiments, the family B polymerase catalytic domain has at least 80%, 85%, 90%, 95%, 98%, 99%, or 100% identity to the catalytic domain of SEQ ID NO: 47, wherein the position corresponding to position 379 of SEQ ID NO: 6 is a neutral amino acid residue. In some embodiments, the family B polymerase catalytic domain has at least 80%, 85%, 90%, 95%, 98%, 99%, or 100% identity to the catalytic domain of SEQ ID NO: 41, wherein the position corresponding to position 379 of SEQ ID NO: 6 is a neutral amino acid residue. In some embodiments, the family B polymerase catalytic domain has at least 80%, 85%, 90%, 95%, 98%, 99%, or 100% identity to the catalytic domain of SEQ ID NO: 45, wherein the position corresponding to position 379 of SEQ ID NO: 6 is a neutral amino acid residue.

[0072] Examples of family B polymerase catalytic domain sequences are shown, e.g., in FIG. 12. In some embodiments, the C-terminus is the residue at the position of the conserved leucine shown as the last residue in the multiple sequence alignment in FIG. 12. In some embodiments, the C-terminus of the family B polymerase catalytic domain is the position corresponding to position 383 of SEQ ID NO: 6. In some embodiments, the C-terminus of the family B polymerase catalytic domain is the position corresponding to the leucine which is the last residue of SEQ ID NO: 6. In some embodiments, the C-terminus of the family B polymerase catalytic domain is the position that aligns to the leucine which is the last residue of SEQ ID NO: 6. In some embodiments, the C-terminus of the family B polymerase catalytic domain is the position corresponding to a leucine selected from the leucines shown as the final residues in FIG. 12. In some embodiments, the C-terminus of the family B polymerase catalytic domain is the position that aligns to a leucine selected from the leucines shown as the final residues in FIG. 12. The C-terminal residue in any of the foregoing embodiments can be a leucine.

[0073] In some embodiment, the thermophilic DNA polymerase comprises an N-terminal domain comprising a uracil-binding pocket that comprises: (a) the consecutive amino acid residues RX¹YIY (SEQ ID NO: 199), (b) the consecutive amino acid residues QX¹YIY (SEQ ID NO: 200), (c) the consecutive amino acid residues EX¹YIY (SEQ ID NO: 201), (d) the consecutive amino acid residues EX¹YFY (SEQ ID NO: 202), or (e) the consecutive amino acid residues RX¹YFY (SEQ ID NO: 203); wherein X¹ is any amino acid other than P; and wherein X¹ is within 50, 45, 44, 43, 42, 41, 40, 39, 38, 37, 36, 35, 34, 33, 32, 31, or 30 residues of the N-terminus of the family B polymerase N-terminal domain comprising a uracil-binding pocket. In some embodiments, the N-terminus of the family B polymerase N-terminal domain comprising a uracil-binding pocket is the N-terminus of the thermophilic DNA polymerase. In some embodiments, X¹ is within 42, 41, 40, 39, 38, 37, or 36 residues of the N-terminus of the family B polymerase N-terminal domain comprising a uracil-binding pocket. In some embodiments, X¹ is within 42 residues of the N-terminus of the family B polymerase N-terminal domain comprising a uracil-binding pocket. In some embodiments, X¹ is within 40 residues of the N-terminus of the family B polymerase N-terminal domain comprising a uracil-binding pocket. In some embodiments, X¹ is within 36 residues of the N-terminus of the family B polymerase N-terminal domain comprising a uracil-binding pocket.

[0074] In some embodiments, the thermophilic DNA polymerase comprises: (a) the consecutive amino acid residues WQKTX² (SEQ ID NO: 204), (b) the consecutive amino acid residues YQKTX² (SEQ ID NO: 205), (c) the consecutive amino acid residues X²QTGL (SEQ ID NO: 206), (d) the consecutive amino acid residues X²QVGL (SEQ ID NO: 207), (e) the consecutive amino acid residues KTX²QT (SEQ ID NO: 208), or (f) the consecutive amino acid residues KTX²QV (SEQ ID NO: 209); wherein X² is a neutral amino acid residue; and wherein X² is within 20, 15, 10, 5, or 4 residues of the C-terminus of the family B polymerase catalytic domain. In some embodiments, The C-terminus of the family B polymerase catalytic domain can be identified as the amino acid that aligns to or corresponds to the last amino acid of SEQ ID NO: 6. In some embodiments, the thermophilic DNA polymerase comprises a consecutive amino acid sequence of WQKTX² (SEQ ID NO: 204), X²QTGL (SEQ ID NO: 206), KTX²QT (SEQ ID NO: 208), YQKTX² (SEQ ID NO: 205), X²QVGL (SEQ ID NO: 207), KTX²QV (SEQ ID NO: 209), YQSSX² (SEQ ID NO: 210), X²QTGL (SEQ ID NO: 206), SSX²QT (SEQ ID NO: 211), wherein X² is a neutral amino acid residue; and wherein X² is within 20, 15, 10, 5, or 4 residues of the C-terminus of the family B polymerase catalytic domain. In some embodiments, the thermophilic DNA polymerase comprises a consecutive amino acid sequence of WQKTX² (SEQ ID NO: 204), X²QTGL (SEQ ID NO: 206), KTX²QT (SEQ ID NO: 208), YQKTX² (SEQ ID NO: 205), X²QVGL (SEQ ID NO: 207), KTX²QV (SEQ ID NO: 209), YQSSX² (SEQ ID NO: 210), X²QTGL (SEQ ID NO: 206), SSX²QT (SEQ ID NO: 211), TGRVX² (SEQ ID NO: 212), X²KSLL (SEQ ID NO: 213), RVX²KS (SEQ ID NO: 214), TGRSX² (SEQ ID NO: 215), X²RTLL (SEQ ID NO: 216), or RSX²RT (SEQ ID NO: 217);

wherein X² is a neutral amino acid residue; and wherein X² is within 20, 15, 10, 5, or 4 residues of the C-terminus of the family B polymerase catalytic domain. X² can be within 15 residues of the C-terminus of the family B polymerase catalytic domain in any of the foregoing embodiments. X² can be within 10 residues of the C-terminus of the family B polymerase catalytic domain in any of the foregoing embodiments. X² can be within 5 residues of the C-terminus of the family B polymerase catalytic domain in any of the foregoing embodiments. X² can be within 4 residues of the C-terminus of the family B polymerase catalytic domain in any of the foregoing embodiments. For the avoidance of doubt, in a sequence segment consisting of n residues, residues 1 to n are within n−1 residues of position n; e.g., if n is 5, positions 1, 2, 3, 4, and 5 and are within 4 residues of position 5.

[0075] This paragraph concerns the neutral amino acid residue referred to in any of the embodiments mentioned in the preceding paragraphs. Neutral amino acid residues do not have side chains containing groups that are more than 50% charged at pH 7.4 in aqueous solution at 37° C., such as carboxyls, amines, and guanidino groups. Neutral amino acid residues include canonical and noncanonical residues unless indicated to the contrary. In some embodiments, the neutral amino acid is a noncanonical residue. A noncanonical residue is a residue other than the twenty amino acid residues abbreviated as one of the twenty following letters: A, C, D, E, F, G, H, I, K, L, M, N, P, Q, R, S, T, V, W, Y (e.g., norleucine and selenomethionine are noncanonical; see, e.g., U.S. Pat. No. 7,541,170 for additional examples of noncanonical residues, which are referred to therein as “nonclassical amino acids or chemical amino acid analogs”). In some embodiments, the neutral amino acid is less than 10%, 1%, 0.1%, or 0.01% charged at pH 7.4 in aqueous solution at 37° C. In some embodiments, the neutral amino acid residue is a polar neutral amino acid residue. A residue is polar if its side chain contains at least one hydrogen bond donor or acceptor. In some embodiments, the neutral amino acid comprises a side chain comprising an alcohol, amide, carbonyl, ester, or ether. In some embodiments, the neutral amino acid comprises a side chain comprising an alcohol. In some embodiments, the neutral amino acid comprises a side chain comprising an amide. In some embodiments, the neutral amino acid residue is Q, N, H, S, T, Y, C, M, W, A, I, L, F, V, P, or G. In some embodiments, the neutral amino acid residue is Q, N, H, S, T, Y, C, M, W, A, I, L, F, V, or G. In some embodiments, the neutral amino acid residue is Q, N, S, T, C, M, A, I, L, V, or G. In some embodiments, the neutral amino acid residue is Q, N, S, T, C, M, A, or G. In some embodiments, the neutral amino acid residue is Q, N, H, S, T, Y, C, M, or W. In some embodiments, the neutral amino acid residue is Q, N, H, S, T, Y, or W. In some embodiments, the neutral amino acid residue is Q, N, H, S, T, C, or M. In some embodiments, the neutral amino acid residue is Q, N, S, T, C, or M. In some embodiments, the neutral amino acid residue is Q, N, S, or T. In some embodiments, the neutral amino acid residue is Q or N. In some embodiments, the neutral amino acid residue is S. In some embodiments, the neutral amino acid residue is T. In some embodiments, the neutral amino acid residue is Q. In some embodiments, the neutral amino acid residue is N.

[0076] In some embodiments, the family B polymerase catalytic domain is a subfamily B3 polymerase domain. In some embodiments, the family B polymerase catalytic domain is a family B polymerase domain of a Pyrococcus in which a neutral amino acid residue is present at a position discussed above. In some embodiments, the family B polymerase catalytic domain is a family B polymerase domain of a Thermococcus in which a neutral amino acid residue is present at a position discussed above. In some embodiments, the family B polymerase catalytic domain is a family B polymerase domain of a Pyrobaculum in which a neutral amino acid residue is present at a position discussed above. In some embodiments, the family B polymerase catalytic domain is a family B polymerase domain of Pyrococcus furiosus in which a neutral amino acid residue is present at a position discussed above. In some embodiments, the family B polymerase catalytic domain is a family B polymerase domain of Pyrococcus species GB-D in which a neutral amino acid residue is present at a position discussed above. In some embodiments, the family B polymerase catalytic domain is a family B polymerase domain of Thermococcus kodakarensis in which a neutral amino acid residue is present at a position discussed above. In some embodiments, the family B polymerase catalytic domain is a family B polymerase domain of Thermococcus litoralis in which a neutral amino acid residue is present at a position discussed above. In some embodiments, the family B polymerase catalytic domain is a family B polymerase domain of Thermococcus gorgonarius in which a neutral amino acid residue is present at a position discussed above. In some embodiments, the family B polymerase catalytic domain is a family B polymerase domain of Thermococcus sp. 9° N-7 in which a neutral amino acid residue is present at a position discussed above. In some embodiments, the family B polymerase catalytic domain is a family B polymerase domain of Pyrobaculum calidifontis in which a neutral amino acid residue is present at a position discussed above. In some embodiments, the family B polymerase catalytic domain is a family B polymerase domain of Pyrobaculum aerophilum in which a neutral amino acid residue is present at a position discussed above.

[0077] In some embodiments, the family B polymerase N-terminal domain comprising a uracil-binding pocket is a subfamily B3 N-terminal domain. In some embodiments, the family B polymerase N-terminal domain comprising a uracil-binding pocket is a family B N-terminal domain of a Pyrococcus in which the position corresponding to position 36 of SEQ ID NO: 1 is any amino acid other than P. In some embodiments, the family B polymerase N-terminal domain comprising a uracil-binding pocket is a family B N-terminal domain of a Thermococcus in which the position corresponding to position 36 of SEQ ID NO: 1 is any amino acid other than P. In some embodiments, the family B polymerase N-terminal domain comprising a uracil-binding pocket is a family B N-terminal domain of a Pyrobaculum in which the position corresponding to position 36 of SEQ ID NO: 1 is any amino acid other than P. In some embodiments, the family B polymerase N-terminal domain comprising a uracil-binding pocket is a family B N-terminal domain of Pyrococcus furiosus in which the position corresponding to position 36 of SEQ ID NO: 1 is any amino acid other than P. In some embodiments, the family B polymerase N-terminal domain comprising a uracil-binding pocket is a family B N-terminal domain of Pyrococcus species GB-D in which the position corresponding to position 36 of SEQ ID NO: 1 is any amino acid other than P. In some embodiments, the family B polymerase N-terminal domain comprising a uracil-binding pocket is a family B N-terminal domain of Thermococcus kodakarensis in which the position corresponding to position 36 of SEQ ID NO: 1 is any amino acid other than P. In some embodiments, the family B polymerase N-terminal domain comprising a uracil-binding pocket is a family B N-terminal domain of Thermococcus litoralis in which the position corresponding to position 36 of SEQ ID NO: 1 is any amino acid other than P. In some embodiments, the family B polymerase N-terminal domain comprising a uracil-binding pocket is a family B N-terminal domain of Thermococcus gorgonarius in which the position corresponding to position 36 of SEQ ID NO: 1 is any amino acid other than P. In some embodiments, the family B polymerase N-terminal domain comprising a uracil-binding pocket is a family B N-terminal domain of Thermococcus sp. 9° N-7 in which the position corresponding to position 36 of SEQ ID NO: 1 is any amino acid other than P. In some embodiments, the family B polymerase N-terminal domain comprising a uracil-binding pocket is a family B N-terminal domain of Pyrobaculum calidifontis in which the position corresponding to position 36 of SEQ ID NO: 1 is any amino acid other than P. In some embodiments, the family B polymerase N-terminal domain comprising a uracil-binding pocket is a family B N-terminal domain of Pyrobaculum aerophilum in which the position corresponding to position 36 of SEQ ID NO: 1 is any amino acid other than P.

[0078] In some embodiments, all domains of the thermophilic DNA polymerase are contained in a single polypeptide. In some embodiments, the thermophilic DNA polymerase comprises a plurality of polypeptide chains, which may be noncovalently associated or covalently associated. In some embodiments, the plurality of polypeptide chains can include a first polypeptide comprising an N-terminal domain comprising a uracil-binding procket and a polymerase catalytic domain and a second polypeptide comprising an additional domain, such as a sequence non-specific double-stranded DNA-binding domain. A covalent association can include, e.g., one or more disulfide bonds or chemical conjugation using a linking compound, e.g., a chemical crosslinking agent, including, for example, succinimidyl-(N-maleimidomethyl)-cyclohexane-1-carboxylate (SMCC). Disulfide bonds and chemical conjugation are discussed further below.

[0079] In some embodiments, the thermophilic DNA polymerase comprises a sequence non-specific DNA-binding domain, e.g., a thermostable DNA binding domain. The DNA binding domain can be, for example, present as part of a fusion protein with the polymerase catalytic domain. In some embodiments, the DNA binding domain is fused C-terminal to the polymerase catalytic domain. In some embodiments, the DNA binding domain is noncovalently associated with the polypeptide comprising the polymerase catalytic domain, e.g., in the manner of the association between sliding clamps and certain family B polymerases. In some embodiments, the polypeptide comprising the polymerase catalytic domain further comprises a sequence that noncovalently associates with an DNA binding domain, such as the PCNA-interacting sequence of a dimeric archaeal polymerase such as Pfu Pol II. As discussed, e.g., in U.S. Pat. No. 7,541,170, an DNA binding domain can provide improved processivity relative to version of the enzyme lacking the DNA binding domain. Processivity reflects the extent to which a polymerase continues to synthesize DNA (adding nucleotides in processive catalytic events) along the same template without falling off. In some embodiments, high processivity correlates to high sensitivity in amplification reactions.

[0080] In some embodiments, the DNA binding domain is covalently conjugated to the polypeptide comprising the polymerase catalytic domain. Techniques for covalent conjugation of heterologous domains are described, e.g., in BIOCONJUGAIE TECHNIQUES, Hermanson, Ed., Academic Press (1996). Such techniques include, for example, derivitization for the purpose of linking the moieties to each other, either directly or through a linking compound, by methods that are well known in the art of protein chemistry. For example, in one chemical conjugation embodiment, the catalytic domain and the nucleic acid binding domain are linked using a heterobifunctional coupling reagent which ultimately contributes to formation of an intermolecular disulfide bond between the two moieties. Other types of coupling reagents that are useful in this capacity for the present invention are described, for example, in U.S. Pat. No. 4,545,985. Alternatively, an intermolecular disulfide may conveniently be formed between cysteines in each moiety, which occur naturally or are inserted by genetic engineering. The means of linking moieties may also use thioether linkages between heterobifunctional crosslinking reagents or specific low pH cleavable crosslinkers or specific protease cleavable linkers or other cleavable or noncleavable chemical linkages.

[0081] In some embodiments, the sequence non-specific double-stranded DNA-binding domain comprises an amino acid sequence having at least 75%, 80%, 85%, 90%, 95%, 98%, 99%, or 100% identity to an amino acid sequence selected from SEQ ID NOs: 53 to 62. In some embodiments, the DNA binding domain is an archaeal DNA binding domain. In some embodiments, the DNA binding domain is a 7 kD DNA-binding domain, which occurs in certain archaeal small basic DNA binding proteins (see, e.g., Choli et al., Biochimica et Biophysica Acta 950:193-203, 1988; Baumann et al., Structural Biol. 1:808-819, 1994; and Gao et al, Nature Struc. Biol. 5:782-786, 1998). Additional archaeal DNA binding domains are discussed in Hardy and Martin, Extremophiles 12:235-46 (2008).

[0082] In some embodiments, the DNA binding domain is an Sso7d domain. In some embodiments, the DNA binding domain is a Sac7d domain. In some embodiments, the DNA binding domain is a Sac7e domain. In some embodiments, the sequence non-specific double-stranded DNA-binding domain comprises an amino acid sequence having at least 75%, 80%, 85%, 90%, 95%, 98%, 99%, or 100% identity to SEQ ID NO: 53. In some embodiments, the sequence non-specific double-stranded DNA-binding domain comprises an amino acid sequence having at least 75%, 80%, 85%, 90%, 95%, 98%, 99%, or 100% identity to SEQ ID NO: 54. In some embodiments, the sequence non-specific double-stranded DNA-binding domain comprises an amino acid sequence having at least 75%, 80%, 85%, 90%, 95%, 98%, 99%, or 100% identity to SEQ ID NO: 62.

[0083] In some embodiments, the DNA binding domain is a Pae3192 domain. In some embodiments, the DNA binding domain is a Pae0384 domain. In some embodiments, the DNA binding domain is a Ape3192 domain. In some embodiments, the sequence non-specific double-stranded DNA-binding domain comprises an amino acid sequence having at least 75%, 80%, 85%, 90%, 95%, 98%, 99%, or 100% identity to SEQ ID NO: 55. In some embodiments, the sequence non-specific double-stranded DNA-binding domain comprises an amino acid sequence having at least 75%, 80%, 85%, 90%, 95%, 98%, 99%, or 100% identity to SEQ ID NO: 56. In some embodiments, the sequence non-specific double-stranded DNA-binding domain comprises an amino acid sequence having at least 75%, 80%, 85%, 90%, 95%, 98%, 99%, or 100% identity to SEQ ID NO: 57.

[0084] In some embodiments, the DNA binding domain is an archaeal histone domain. In some embodiments, the archaeal histone domain is an HMf family archaeal histone domain (see, e.g., Starich et al., J Molec. Biol. 255:187-203, 1996; Sandman et al., Gene 150:207-208, 1994). In some embodiments, the archaeal histone domain is an HMf family archaeal histone domain from Methanothermus. In some embodiments, the archaeal histone domain is an HMf family archaeal histone domain from Pyrococcus. In some embodiments, the archaeal histone domain is an HMf family archaeal histone domain from Methanothermus fervidus. In some embodiments, the archaeal histone domain is an HMf family archaeal histone domain from Pyrococcus strain GB-3a. In some embodiments, the archaeal histone domain is a Methanothermus HMfA archaeal histone domain. In some embodiments, the archaeal histone domain is a Methanothermus HMfB archaeal histone domain. In some embodiments, the archaeal histone domain is a Pyrococcus HpyA1 archaeal histone domain. In some embodiments, the archaeal histone domain is a Pyrococcus HpyA2 archaeal histone domain. In some embodiments, the sequence non-specific double-stranded DNA-binding domain comprises an amino acid sequence having at least 75%, 80%, 85%, 90%, 95%, 98%, 99%, or 100% identity to SEQ ID NO: 58. In some embodiments, the sequence non-specific double-stranded DNA-binding domain comprises an amino acid sequence having at least 75%, 80%, 85%, 90%, 95%, 98%, 99%, or 100% identity to SEQ ID NO: 59. In some embodiments, the sequence non-specific double-stranded DNA-binding domain comprises an amino acid sequence having at least 75%, 80%, 85%, 90%, 95%, 98%, 99%, or 100% identity to SEQ ID NO: 60. In some embodiments, the sequence non-specific double-stranded DNA-binding domain comprises an amino acid sequence having at least 75%, 80%, 85%, 90%, 95%, 98%, 99%, or 100% identity to SEQ ID NO: 61.

[0085] In some embodiments, the DNA binding domain is a sliding clamp, such as an archaeal PCNA homolog. Sliding clamps can exist as trimers in solution, and can form a ring-like structure with a central passage capable of accommodating double-stranded DNA. The sliding clamp forms specific interactions with the amino acids located at the C terminus of particular DNA polymerases, and tethers those polymerases to the DNA template during replication. The sliding clamp in eukaryotes is referred to as the proliferating cell nuclear antigen (PCNA), while similar proteins in other domains are often referred to as PCNA homologs. These homologs have marked structural similarity but limited sequence similarity. PCNA homologs have been identified from thermophilic Archaea (e.g., Sulfolobus solfataricus, Pyrococcus furiosus, etc.). Some family B polymerases in Archaea have a C terminus containing a consensus PCNA-interacting amino acid sequence and are capable of using a PCNA homolog as a processivity factor (see, e.g., Cann et al., J. Bacteriol. 181:6591-6599, 1999 and De Felice et al., J Mol. Biol. 291:47-57, 1999). These PCNA homologs are useful sequence-non-specific double-stranded DNA binding domains. For example, a consensus PCNA-interacting sequence can be joined to a polymerase that does not naturally interact with a PCNA homolog, thereby allowing a PCNA homolog to serve as a processivity factor for the polymerase. By way of illustration, the PCNA-interacting sequence from Pyrococcus furiosus Pol II (a heterodimeric DNA polymerase containing two family B-like polypeptides) can be covalently joined to a sequence based on Pyrococcus furiosus Pol I (a monomeric family B polymerase that does not normally interact with a PCNA homolog). The resulting fusion protein can then be allowed to associate non-covalently with the Pyrococcus furiosus PCNA homolog to generate a heterologous protein with increased processivity.

[0086] Nucleic acids encoding the domains of a fusion protein invention can be obtained using recombinant genetics techniques. Basic texts disclosing the general methods for doing so include Sambrook et al., MOLECULAR CLONING, A LABORATORY MANUAL (2nd ed. 1989); Kriegler, GENE TRANSFER AND EXPRESSION: A LABORATORY MANUAL (1990); and CURRENT PROTOCOLS IN MOLECULAR BIOLOGY (Ausubel et al., eds., 1994)).

[0087] In some embodiments, catalytic and binding domains of the polymerase are joined by a linker domain, e.g., a polypeptide sequence of 1 to about 200 amino acids in length, such as 1 to about 100, 50, 25, or 10 amino acids. In some embodiments, proline residues are incorporated into the linker to prevent the formation of significant secondary structural elements by the linker. Linkers can often be flexible amino acid subsequences that are synthesized as part of a recombinant fusion protein. For a discussion of linkers, see, e.g., US 2011/0086406 A1 including at paragraphs 83-89 thereof.

[0088] In some embodiments, the thermophilic DNA polymerase comprises an exonuclease domain. In some embodiments, the exonuclease domain is a 3′ to 5′ exonuclease domain. The 3′-5′ exonuclease domain can have error-correcting activity, also known as proofreading activity, in which the exonuclease preferentially removes a base from a nascent DNA strand/extension product/3′ terminus that is not a Watson-Crick match to the template strand. In some embodiments, the 3′-5′ exonuclease domain is a DEDDy archaeal exonuclease domain. In some embodiments, the exonuclease domain is N-terminal to the DNA polymerase catalytic domain. In some embodiments, the exonuclease domain is C-terminal to the N-terminal domain comprising a uracil-binding pocket. In some embodiments, the exonuclease domain is N-terminal to the DNA polymerase catalytic domain and C-terminal to the N-terminal domain comprising a uracil-binding pocket. In some embodiments, the thermophilic DNA polymerase comprises a domain having at least 75%, 80%, 85%, 90%, 95%, 98%, 99%, or 100% identity to SEQ ID NO: 63. In some embodiments, the thermophilic DNA polymerase comprises a domain having at least 75%, 80%, 85%, 90%, 95%, 98%, 99%, or 100% identity to the exonuclease domain of a sequence selected from SEQ ID NO: 1, 19, 23, 31, 35, 39, 43, 49, 51, or 52. In some embodiments, the thermophilic DNA polymerase comprises a domain having at least 75%, 80%, 85%, 90%, 95%, 98%, 99%, or 100% identity to the exonuclease domain of SEQ ID NO: 1. In some embodiments, the thermophilic DNA polymerase comprises a domain having at least 75%, 80%, 85%, 90%, 95%, 98%, 99%, or 100% identity to the exonuclease domain of SEQ ID NO: 19. In some embodiments, the thermophilic DNA polymerase comprises a domain having at least 75%, 80%, 85%, 90%, 95%, 98%, 99%, or 100% identity to the exonuclease domain of SEQ ID NO: 23. In some embodiments, the thermophilic DNA polymerase comprises a domain having at least 75%, 80%, 85%, 90%, 95%, 98%, 99%, or 100% identity to the exonuclease domain of SEQ ID NO: 31. In some embodiments, the thermophilic DNA polymerase comprises a domain having at least 75%, 80%, 85%, 90%, 95%, 98%, 99%, or 100% identity to the exonuclease domain of SEQ ID NO: 35. In some embodiments, the thermophilic DNA polymerase comprises a domain having at least 75%, 80%, 85%, 90%, 95%, 98%, 99%, or 100% identity to the exonuclease domain of SEQ ID NO: 39. In some embodiments, the thermophilic DNA polymerase comprises a domain having at least 75%, 80%, 85%, 90%, 95%, 98%, 99%, or 100% identity to the exonuclease domain of SEQ ID NO: 43. In some embodiments, the thermophilic DNA polymerase comprises a domain having at least 75%, 80%, 85%, 90%, 95%, 98%, 99%, or 100% identity to the exonuclease domain of SEQ ID NO: 49. In some embodiments, the thermophilic DNA polymerase comprises a domain having at least 75%, 80%, 85%, 90%, 95%, 98%, 99%, or 100% identity to the exonuclease domain of SEQ ID NO: 51. In some embodiments, the thermophilic DNA polymerase comprises a domain having at least 75%, 80%, 85%, 90%, 95%, 98%, 99%, or 100% identity to the exonuclease domain of SEQ ID NO: 52. An exonuclease domain can be identified using BLASTP against the RefSeq database can be identified by using NCBI BLASTP to search the RefSeq database. NCBI BLASTP automatically identifies certain domains such as exonuclease domains and indicates their termini as the positions at which the domain begins and ends.

[0089] In some embodiments, the exonuclease domain is an exonuclease domain of a Pyrococcus. In some embodiments, the exonuclease domain is an exonuclease domain of a Thermococcus. In some embodiments, the exonuclease domain is an exonuclease domain of a Pyrobaculum. In some embodiments, the exonuclease domain is an exonuclease domain of Pyrococcus furiosus. In some embodiments, the exonuclease domain is an exonuclease domain of Pyrococcus species GB-D. In some embodiments, the exonuclease domain is an exonuclease domain of Thermococcus kodakarensis. In some embodiments, the exonuclease domain is an exonuclease domain of Thermococcus litoralis. In some embodiments, the exonuclease domain is an exonuclease domain of Thermococcus gorgonarius. In some embodiments, the exonuclease domain is an exonuclease domain of Thermococcus sp. 9° N-7. In some embodiments, the exonuclease domain is an exonuclease domain of Pyrobaculum calidifontis. In some embodiments, the exonuclease domain is an exonuclease domain of Pyrobaculum aerophilum.

[0090] In some embodiments, the thermophilic DNA polymerase comprises an inactivated or reduced-activity exonuclease domain. An inactivated exonuclease domain is a mutated version of a wild-type domain that has less than 50% of the wild-type exonuclease activity. In some embodiments, the inactivated domain has less than 40%, less than 30%, less than 25%, less than 20%, less than 15%, less than 10%, or less than 5% of the wild-type exonuclease activity. In some embodiments, the inactivated domain has less than 2%, 1%, 0.5%, 0.2%, 0.1%, 0.05%, 0.02%, or 0.01% of the wild-type exonuclease activity. A reduced-activity exonuclease domain is a mutated version of a wild-type domain that has less than 10% of the wild-type exonuclease activity. Measurement of exonuclease activity is described, for example, in DNA Replication 2nd, edition, by Kornberg and Baker, W.H. Freeman & Company, New York, N.Y. 1991. Examples of exo⁻ DNA polymerase mutants include those with a single mutation in Motif I and/or II (Motifs are as described, e.g., in U.S. Pat. No. 8,921,043, e.g., at FIG. 2), or a double mutation in Motif I (such as D141A and E143A, the position numbering corresponds to Pfu polymerase, SEQ ID NO: 1), that reportedly abolishes detectible exonuclease activity (see for example, VENT® (Thermococcus litoralis) (Kong et al. J. Biol. Chem. 268(3):1965-1975) (New England Biolabs, Inc. (NEB), Ipswich, Mass.); Thermococcus JDF-3 (U.S. Pat. No. 6,946,273, U.S. 2005/0069908); KODI (Thermococcus kodakaraensis) (U.S. Pat. No. 6,008,025); Pfu (Pyrococcus furiosus) (U.S. Pat. Nos. 5,489,523, 7,704,712, and 7,659,100); and 9° N (Thermococcus sp.) (U.S. 2005/0123940 and Southworth et al. Proc Natl Acad Sci USA 93:5281-5285 (1996)); see also U.S. Pat. No. 8,921,043. In some embodiments, the exonuclease domain has a D141A, E143A, D215A, D315A, D141A/E143A, D141A/D315A, E143A/D315A, D215A/D315A, or D141A/E143A/D315A mutation. In some embodiments, the exonuclease domain has an A, N, S, T, or E residue at the position corresponding to position 141 of SEQ ID NO: 1. In some embodiments, the exonuclease domain has an A at the position corresponding to position 141 of SEQ ID NO: 1. In some embodiments, the exonuclease domain has an A at the position corresponding to position 143 of SEQ ID NO: 1.

[0091] In some embodiments, the amino acid residue at the position of the family B polymerase catalytic domain amino acid sequence that aligns to position 25 of SEQ ID NO: 6 is a serine. In some embodiments, the amino acid residue at the position of the family B polymerase catalytic domain amino acid sequence that corresponds to position 25 of SEQ ID NO: 6 is a serine. In some embodiments, the thermophilic DNA polymerase comprises: (a) the consecutive amino acid residues LDFRS (SEQ ID NO: 196), (b) the consecutive amino acid residues FRSLY (SEQ ID NO: 197), or (c) the consecutive amino acid residues SLYPS (SEQ ID NO: 198), wherein the underlined serine residue is within 30 amino acid residues of the N-terminus of the family B polymerase catalytic domain. In some embodiments, the thermophilic DNA polymerase comprises:

(a) the consecutive amino acid residues LDFRS* (SEQ ID NO: 196), (b) the consecutive amino acid residues FRS*LY (SEQ ID NO: 197), or (c) the consecutive amino acid residues S*LYPS (SEQ ID NO: 198), wherein the serine residue immediately followed by an asterisk is within 30 amino acid residues of the N-terminus of the family B polymerase catalytic domain. The asterisk is included solely to designate the serine that is within 30 amino acid residues of the N-terminus of the family B polymerase catalytic domain and does not signify a structural difference. In some embodiments, the N-terminus of the family B polymerase catalytic domain is the residue immediately preceding the conserved tyrosine shown as the second residue in the multiple sequence alignment in FIG. 12. In some embodiments, the N-terminus of the family B polymerase catalytic domain is the position immediately preceding the position corresponding to the first tyrosine in SEQ ID NO: 6. In some embodiments, the N-terminus of the family B polymerase catalytic domain is the position that aligns to position 1 of SEQ ID NO: 6. In some embodiments, the N-terminus of the family B polymerase catalytic domain is the position corresponding to the position immediately preceding a tyrosine selected from the tyrosines shown as the second residues in FIG. 12. In some embodiments, the N-terminus of the family B polymerase catalytic domain is the position immediately preceding the position that aligns to a tyrosine selected from the tyrosines shown as the second residues in FIG. 12. In some embodiments, the N-terminus of the family B polymerase catalytic domain is the position immediately preceding the position corresponding to a tyrosine selected from the tyrosines shown as the second residues in FIG. 12. The N-terminal residue in any of the foregoing embodiments can be a serine. The N-terminal residue in any of the foregoing embodiments can be a threonine. The N-terminal residue in any of the foregoing embodiments can be a glycine. The N-terminal residue in any of the foregoing embodiments can be a proline.

[0092] As will be apparent from various aspects of the discussion above, family B polymerases are well-characterized in general and are known to tolerate mutations at a number of positions. Furthermore, the following is a non-exhaustive list of patents and published applications that discuss mutations in family B polymerases and the properties of mutated family B polymerases: U.S. Pat. Nos. 8,435,775; 8,557,554; WO2007/016702; US 2003/0180741; WO 2004/011605; WO 2003/060144; and U.S. Pat. No. 9,023,633. Accordingly, those skilled in the art will understand in view of this disclosure that the residues discussed herein such as the neutral amino acid at the position corresponding to position 379 of SEQ ID NO: 6 can be incorporated into a wide variety of thermophilic family B polymerases and can be accompanied by other amino acid residues that differ from wild-type residues. Thus, in some embodiments, the thermophilic DNA polymerase comprises an amino acid sequence comprising at least one difference from SEQ ID NO: 1 at a position corresponding to position 15, 72, 93, 141, 143, 247, 265, 337, 385, 387, 388, 399, 400, 405, 407, 410, 485, 542, 546, 593, or 595 of SEQ ID NO: 1. In some embodiments, the thermophilic DNA polymerase comprises an amino acid sequence comprising at least one missing residue corresponding to position 92, 93, 94, or 381 of SEQ ID NO: 1. In some embodiments, the at least one difference or missing residue is in the exonuclease domain. In some embodiments, the at least one difference or missing residue is in the polymerase catalytic domain.

[0093] In some embodiments, the polymerase with the at least one difference or missing residue has an expanded substrate range relative to a polymerase without the difference or in which the residue is not missing. In some embodiments, the at least one difference comprises a G or D at the position corresponding to position 400 of SEQ ID NO: 1. In some embodiments, the at least one difference comprises an I at the position corresponding to position 407 of SEQ ID NO: 1. In some embodiments, the at least one difference comprises an I at the position corresponding to position 337 of SEQ ID NO: 1. In some embodiments, the at least one difference comprises a D at the position corresponding to position 399 of SEQ ID NO: 1. In some embodiments, the at least one difference comprises an H at the position corresponding to position 546 of SEQ ID NO: 91.

[0094] In some embodiments, the polymerase with the at least one difference or missing residue incorporates a nucleotide analog to a greater extent than a polymerase without the difference or in which the residue is not missing. In some embodiments, the at least one difference comprises an L at the position corresponding to position 410 of SEQ ID NO: 1. In some embodiments, the at least one difference comprises a T at the position corresponding to position 485 of SEQ ID NO: 1.

[0095] In some embodiments, the polymerase with the at least one difference or missing residue has reduced uracil sensitivity relative to a polymerase without the difference or in which the residue is not missing. In some embodiments, the at least one missing residue comprises a missing residue at the position corresponding to position 93 of SEQ ID NO: 1. In some embodiments, the at least one missing residue comprises a missing residue at the position corresponding to position 94 of SEQ ID NO: 1. In some embodiments, the at least one missing residue comprises a missing residue at the position corresponding to position 92 of SEQ ID NO: 1. In some embodiments, the at least one difference comprises a Q, R, E, A, K, N, or G at the position corresponding to position 93 of SEQ ID NO: 1. In some embodiments, the at least one difference comprises a Q or R at the position corresponding to position 93 of SEQ ID NO: 1. In some embodiments, an at least one difference or missing residue as discussed above in this paragraph is accompanied by at least one difference or missing residue that offsets a loss of activity. In some embodiments, the at least one difference that offsets a loss of activity comprises an R at the position corresponding to position 247 of SEQ ID NO: 1. In some embodiments, the at least one difference that offsets a loss of activity comprises an R at the position corresponding to position 265 of SEQ ID NO: 1. In some embodiments, the at least one difference that offsets a loss of activity comprises an R at the position corresponding to position 485 of SEQ ID NO: 1. In some embodiments, the at least one missing residue that offsets a loss of activity comprises a missing residue at the position corresponding to position 381 of SEQ ID NO: 1.

[0096] In some embodiments, the at least one difference comprises an R at the position corresponding to position 247 of SEQ ID NO: 1. In some embodiments, the at least one difference comprises an R at the position corresponding to position 265 of SEQ ID NO: 1. In some embodiments, the at least one difference comprises an R at the position corresponding to position 485 of SEQ ID NO: 1. In some embodiments, the at least one missing residue comprises a missing residue at the position corresponding to position 381 of SEQ ID NO: 1. In some embodiments, the at least one difference comprises an I at the position corresponding to position 15 of SEQ ID NO: 1. In some embodiments, the at least one difference comprises an R at the position corresponding to position 72 of SEQ ID NO: 1.

[0097] In some embodiments, the polymerase with the at least one difference or missing residue has an altered proofreading spectrum relative to a polymerase without the difference or in which the residue is not missing. In some embodiments, the at least one difference comprises a P or S at the position corresponding to position 387 of SEQ ID NO: 1. In some embodiments, the at least one difference comprises an E at the position corresponding to position 405 of SEQ ID NO: 1. In some embodiments, the at least one difference comprises an F at the position corresponding to position 410 of SEQ ID NO: 1. In some embodiments, the at least one difference comprises a P at the position corresponding to position 542 of SEQ ID NO: 1. In some embodiments, the at least one difference comprises a T at the position corresponding to position 593 of SEQ ID NO: 1. In some embodiments, the at least one difference comprises an S at the position corresponding to position 595 of SEQ ID NO: 1. In some embodiments, the at least one difference comprises a Q, S, N, L, or H at the position corresponding to position 385 of SEQ ID NO: 1. In some embodiments, the at least one difference comprises a P at the position corresponding to position 388 of SEQ ID NO: 1.

[0098] In some embodiments, the thermophilic DNA polymerase comprises an amino acid sequence having at least 90%, 95%, 98%, 99%, or 100% identity to a sequence selected from SEQ ID NOs: 11 to 14, 19 to 22, 27 to 30, and 76 to 79. In some embodiments, the thermophilic DNA polymerase comprises an amino acid sequence having at least 90%, 95%, 98%, 99%, or 100% identity to SEQ ID NO: 11. In some embodiments, the thermophilic DNA polymerase comprises an amino acid sequence having at least 90%, 95%, 98%, 99%, or 100% identity to SEQ ID NO: 12. In some embodiments, the thermophilic DNA polymerase comprises an amino acid sequence having at least 90%, 95%, 98%, 99%, or 100% identity to SEQ ID NO: 13. In some embodiments, the thermophilic DNA polymerase comprises an amino acid sequence having at least 90%, 95%, 98%, 99%, or 100% identity to SEQ ID NO: 14. In some embodiments, the thermophilic DNA polymerase comprises an amino acid sequence having at least 90%, 95%, 98%, 99%, or 100% identity to SEQ ID NO: 19. In some embodiments, the thermophilic DNA polymerase comprises an amino acid sequence having at least 90%, 95%, 98%, 99%, or 100% identity to SEQ ID NO: 20. In some embodiments, the thermophilic DNA polymerase comprises an amino acid sequence having at least 90%, 95%, 98%, 99%, or 100% identity to SEQ ID NO: 21. In some embodiments, the thermophilic DNA polymerase comprises an amino acid sequence having at least 90%, 95%, 98%, 99%, or 100% identity to SEQ ID NO: 22. In some embodiments, the thermophilic DNA polymerase comprises an amino acid sequence having at least 90%, 95%, 98%, 99%, or 100% identity to SEQ ID NO: 27. In some embodiments, the thermophilic DNA polymerase comprises an amino acid sequence having at least 90%, 95%, 98%, 99%, or 100% identity to SEQ ID NO: 28. In some embodiments, the thermophilic DNA polymerase comprises an amino acid sequence having at least 90%, 95%, 98%, 99%, or 100% identity to SEQ ID NO: 29. In some embodiments, the thermophilic DNA polymerase comprises an amino acid sequence having at least 90%, 95%, 98%, 99%, or 100% identity to SEQ ID NO: 30. In some embodiments, the thermophilic DNA polymerase comprises an amino acid sequence having at least 90%, 95%, 98%, 99%, or 100% identity to SEQ ID NO: 76. In some embodiments, the thermophilic DNA polymerase comprises an amino acid sequence having at least 90%, 95%, 98%, 99%, or 100% identity to SEQ ID NO: 77. In some embodiments, the thermophilic DNA polymerase comprises an amino acid sequence having at least 90%, 95%, 98%, 99%, or 100% identity to SEQ ID NO: 78. In some embodiments, the thermophilic DNA polymerase comprises an amino acid sequence having at least 90%, 95%, 98%, 99%, or 100% identity to SEQ ID NO: 79.

[0099] In some embodiments, the polymerase comprises an affinity purification tag. In some embodiments, the affinity purification tag comprises a sequence of histidines, such as 6, 7, 8, 9, or 10 consecutive histidines (SEQ ID NO: 218). The affinity purification tag can be located, e.g., at the N or C terminus of a polypeptide of the polymerase.

### Hot Start Enzymes and Compositions

[0100] In some embodiments, a polymerase according to this disclosure is provided as a hot-start enzyme or a hot start composition. For discussion of hot-start enzymes and/or compositions, see, e.g., U.S. Pat. Nos. 5,338,671; 7,074,556; US Publication 2015/0044683; US Publication 2014/0099644. As used herein, the term “hot start” generally refers to a means of limiting the availability of an essential reaction component (e.g., a polymerase) when the reaction mixture is maintained at a first temperature (typically a lower temperature) until a second temperature (typically a higher temperature) is reached which allows the essential component to participate in the reaction. Hot start reactions typically involve incubation at a first (e.g., lower) temperature and subsequent elevation to a second (e.g., higher) temperature which allows the desired reaction to take place. Activation of the hot start reaction is preferably achieved by an incubation at a temperature which is equal to or higher than the primer hybridization (annealing) temperature used in the amplification reaction to ensure primer binding specificity. The length of incubation required to recover enzyme activity depends on the temperature and pH of the reaction mixture and on the stability of the enzyme. A wide range of incubation conditions are usable; optimal conditions may be determined empirically for each reaction.

[0101] As used herein, the term “dual hot start reaction mixture” refers to the combination of reagents or reagent solutions which are used to block nucleic acid polymerase extension at low temperatures (e.g., ambient temperature) until the hot start conditions of the initial denaturation temperature in an amplification reaction (e.g., PCR) are reached. At the elevated amplification temperature, the nucleic acid polymerase is no longer inhibited and allows for primer extension. As used herein, the dual hot start reaction mixture is meant to include a reaction mixture that comprises at least two different mechanisms for hot start. Accordingly, “dual hot start reaction mixtures” may include more than two hot start mechanisms (e.g., “triple hot start reaction mixture”, “quadruple hot start reaction mixture”, “quintuple hot start reaction mixture”, and so on).

[0102] Nonlimiting exemplary hot start mechanisms include, but are not limited to, antibodies or combinations of antibodies that block nucleic acid polymerase activity at lower temperatures and which dissociate from the polymerase at elevated temperatures (see, e.g., Eastlund et al., LifeSci. Quarterly 2:2 (2001), Mizuguchi et al., J. Biochem. (Tokyo) 126:762 (1999)); affibodies (small synthetic protein molecules that have high binding affinity for a target protein) or combinantions of affibodies, sometimes referred to as antibody mimetics; oligonucleotides that block nucleic acid polymerase activity at lower temperatures and which dissociate from the polymerase at elevated temperatures (see, e.g., Dang et al., J. Mol. Biol. 264:268 (1996)); reversible chemical modification of the nucleic acid polymerase such that the nucleic acid polymerase activity is blocked at lower temperatures and the modifications reverse or dissociate at elevated temperatures (see, e.g., U.S. Pat. No. 5,773,258 and Moretti et al., Biotechniques 25:716 (1998)); amino acid mutations of the nucleic acid polymerase that provide reduced activity at lower temperatures (see, e.g., Kermekchiev et al., Nucl. Acids Res. 31:6139 (2003)); nucleic acid polymerase fusion proteins including hyperstable DNA binding domains and topoisomerases (see, e.g., Pavlov et al., Proc. Natl. Acad. Sci. USA 99:13510 (2002)); ligands that inhibit the nucleic acid polymerase in a temperature-dependent manner (for example, HotMaster™ Taq DNA polymerase from Eppendorf (Hauppauge, N.Y.) and 5 PRIME (Gaithersburg, Md.)); single-stranded binding proteins that sequester primers at low temperatures (see, e.g., U.S. Patent Application Publication No. 2008/0138878); thermostable pyrophosphatase which hydrolyzes inorganic pyrophosphate at elevated temperatures (see, e.g., U.S. Patent Application Publication No. 2006/0057617); thermolabile blockers, such as a polymerase blocking protein (see, e.g., U.S. Patent Application Publication No. 2007/0009922); primer competitor sequences (see, e.g., Puskas et al., Genome Res. 5:309 (1995) and Vestheim et al., Front. Zool. 5:12 (2008)); modified primer constructs (see, e.g., Ailenberg et al., Biotechniques 29:22 (2000) and Kaboev et al., Nucl. Acids Res. 28:E94 (2000)); modified primers that improve hybridization selectivity (see, e.g., U.S. Pat. Nos. 6,794,142 and 6,001,611); primers with 3′ modifications that are removable by 3′-5′ exonuclease activity (see, e.g., U.S. Patent Application Publication No. 2003/0119150 and U.S. Pat. No. 6,482,590); primers with modified nucleobases that are removable by UV irradiation (see, e.g., Young et al., Chem. Commun. (Camb) 28:462 (2008)); primer modifications that are removable by thermal deprotection (see, e.g., U.S. Patent Application Publication No. 2003/0162199 and Lebedev et al., Nucl. Acids Res. 36:e131 (2008)); or modification of the dNTPs with thermolabile modification groups (see, e.g., U.S. Patent Application Publication No. 2003/0162199 and Koukhareva et al., Nucl. Acids Symp. Ser. (Oxford), 259 (2008)). Agents that are used as hot start mechanisms, such as antibodies, oligonucleotides, affibodies, chemical modifications, etc., may be referred to as “hot start inhibitors.”

[0103] In some embodiments, the hot start composition comprises an antibody specific for the polymerase. In some embodiments, the hot start composition comprises an antibody specific for the polymerase, which is bound to the polymerase. In some embodiments, the hot start composition comprises an inhibitor specific for the polymerase, which is bound to the polymerase. In some embodiments, the inhibitor comprises an Affibody®. Affibodies are described, e.g., in US Publication 2012/0082981; see also Nord et al., 2000, J. Biotechnol. 80: 45-54; U.S. Pat. No. 6,602,977; Nygren, 2008, FEBS J. 275: 2668-2676; Nord et al., 1997, 15: 772-777; U.S. Pat. No. 5,831,012. In some embodiments, the inhibitor comprises an oligonucleotide. In some embodiments, the inhibitor comprises a chemical modification.

[0104] As used herein, dual hot start reaction mixtures comprising “at least two different mechanisms” encompass those reaction mixtures that may comprise at least two different hot start mechanisms that function similarly or use similar components. For example, dual hot start reaction mixtures can comprise reagents or reagent solutions designed for two different antibody-based hot start mechanisms, or two different oligonucleotide-based hot start mechanisms, or one antibody-based and one oligonucleotide-based hot start mechanism, or one antibody-based and one chemical modification-based hot start mechanism, or any such combination available.

### Hot Start Antibodies and Methods of Making Same

[0105] In some embodiments, a hot start composition or dual hot start composition comprises an antibody inhibitor of a thermostable polymerase described herein. In some embodiments, the antibody is a monoclonal antibody.

[0106] Methods for producing and screening for antibodies that are suitable for use in hot start compositions with the polymerases described herein are known in the art. In some embodiments, a hot start antibody inhibits the nucleic acid synthesis activity of the thermostable polymerase described herein. In some embodiments, a hot start antibody inhibits exonuclease activity of the thermostable polymerase. In some embodiments, a hot start antibody inhibits both the nucleic acid synthesis activity and the exonuclease activity of the thermostable polymerase.

[0107] In some embodiments, hot-start antibodies increase the specificity of nucleic acid synthesis reactions, because they inactivate the polymerase at room temperature, thus avoiding extension of nonspecifically hybridized primers. The functional activity of the polymerase is restored by disassociating the antibody from the polymerase, for example, by incubating the composition at a higher temperature. In some embodiment, the “higher temperature” is from about 65° C. to about 99° C., from about 70° C. to about 99° C., 75° C. to about 99° C., or from about 80° C. to about 99° C., or from about 85° C. to about 99° C., or from about 90° C. to about 99° C., for a time period of at least 15 seconds, or at least 30 seconds, or at least 1 minute, or at least 90 seconds, or at least 2 minutes; to about 3 minutes, or about 4 minutes, or about 5 minutes, or about 7 minutes, or about 10 minutes, or more. In some embodiments, the higher temperature is at least 60° C., at least 65° C., at least 70° C., at least 75° C., at least 80° C., or at least 85° C. In some embodiments, the temperature and duration of incubation to disassociate the antibody and activate the polymerase may be determined for the particular polymerase and antibody to be employed.

[0108] Methods for screening for antibodies of use in the present invention include methods known in the art, such as affinity-based ELISA assays, as well as functional assays for polymerase and/or exonuclease inhibition. For such functional assays, the amount of DNA produced or digested per unit of time can be correlated to the activity of the polymerase or exonuclease used, thus providing an estimate of the amount of inhibition a particular antibody can exert on either or both the polymerase and exonuclease activity of the polymerase.

[0109] Antibodies may be produced using any method known in the art. As a non-limiting example, an antibody to a particular antigen (such as a polymerase described herein) may be produced by immunizing an animal (such as a mouse, rat, rabbit, goat, sheep, horse, etc.) with the antigen and isolating antibodies from the serum of the animal and/or immortalizing primary B cells from the animal to produce hybridomas that express the antibodies. Phage display technology may also be used to produce antibodies that bind to the polymerases described herein. Phage display libraries are commercially available and methods of selecting antibodies from such libraries are known in the art. See, e.g., Vaughan et al., 1996, Nature Biotechnology, 14:309-314; Sheets et al., 1998, Proc. Natl. Acad. Sci. (USA) 95:6157-6162; Hoogenboom and Winter, 1991, J. Mol. Biol., 227:381; Marks et al., 1991, J. Mol. Biol., 222:581.

### Exemplary Assays to Determine Polymerase Processivity, Yield, Sensitivity, and Specificity

[0110] Polymerase processivity may be measured using various methods known in the art. In some embodiments, processivity refers to the number of nucleotides incorporated during a single binding event of polymerase to a primed template. As a nonlimiting example, a detectably labeled primer may be annealed to circular or linearized DNA to form a primed nucleic acid template. In measuring processivity, the primed nucleic acid template may be present in significant molar excess to the polymerase to reduce the likelihood that any one primed template will be extended more than once by a polymerase. A “significant molar excess” may be, for example, a ratio of 500:1, or 1000:1, or 2000:1, or 4000:1, or 5000:1 (primed DNA:DNA polymerase), etc., in the presence of suitable buffers and dNTPs. Nucleic acid synthesis may be initiated by adding, for example, MgCl₂. Nucleic acid synthesis reactions are quenched at various times after initiation, and analyzed by any appropriate method to determine the length of the product. At a polymerase concentration where the median product length does not change with time or polymerase concentration, the length corresponds to the processivity of the enzyme. In some embodiments, the processivity of a polymerase described, such as a polymerase comprising a neutral amino acid at position corresponding to position 762 of SEQ ID NO: 1 may be compared to the processivity of the same polymerase without the neutral amino acid mutation.

[0111] In some embodiments, yield can be demonstrated by measuring the ability of a polymerase to produce product. Increased yield can be demonstrated by determining the amount of product obtained in a reaction using a polymerase described herein (such as a polymerase comprising a neutral amino acid at position corresponding to position 762 of SEQ ID NO: 1), as compared to the amount of product obtained in a reaction carried out under the same reaction conditions, but with the same polymerase without the neutral amino acid mutation.

[0112] In some embodiments, long PCR may be used to determine enhanced processivity and yield. For example, an enzyme with enhanced processivity typically allows the amplification of a longer amplicons (>5 kb) in shorter extension times compared to an enzyme with relatively lower processivity.

[0113] Other methods of assessing efficiency of the polymerases of the invention can be determined by those of ordinary skill in the art using standard assays of the enzymatic activity of a given modification enzyme.

[0114] The sensitivity of a polymerase described herein may be determined by measuring the yield of nucleic acid synthesis product in a series of reactions with differing copy numbers of nucleic acid template. In some embodiments, the template copy number at which a polymerase of the invention (such as a polymerase comprising a neutral amino acid at position corresponding to position 762 of SEQ ID NO: 1) produces detectable product is compared to the template copy number at which the same polymerase without the neutral amino acid mutation produces detectable product. The lower the template copy number at which the polymerase produces detectable product, the more sensitive the polymerase.

[0115] In some embodiments, specificity of a polymerase may be measured by determining the ability of the polymerase to discriminate between matched primer/template duplexes and mismatched primer/template duplexes. In some embodiments, specificity is a measure of the difference in the relative yield of two reactions, one of which employs a matched primer, and one of which employs a mismatched primer. In some embodiments, an enzyme with increased discrimination will have a higher relative yield with the matched primer than with the mismatched primer. In some embodiments, a ratio of the yield with the matched primer versus the mismatched primer is determined. In some embodiments, the ratio can be compared to the yield obtained under the same reaction conditions using the parental polymerase.

### DNA Synthesis Methods; Kits, Compositions, Systems, and Apparatuses.

[0116] Provided herein are methods of synthesizing or amplifying DNA and related kits, compositions, systems, and apparatuses involving at least one polymerase according to this disclosure. In some embodiments, reagents for nucleic acid synthesis are provided. In some embodiments, reagents for nucleic acid synthesis include any one or any combination of target polynucleotides, particles attached with capture primers, solution-phase primers, fusion primers, other additional primers, enzymes (e.g., polymerases), accessory proteins (e.g., recombinase, recombinase loading protein, single-stranded binding protein, helicase or topoisomerase), nucleotides, divalent cations, binding partners, co-factors and/or buffer. In some embodiments, reagents for nucleic acid synthesis include a dUTPase as an accessory protein.

[0117] In some embodiments, the disclosure relates generally to compositions, as well as related systems, methods, kits and apparatuses, comprising one or more nucleotides. In some embodiments, the compositions (and related methods, systems, kits and apparatuses) includes one type, or a mixture of different types of nucleotides. A nucleotide comprises any compound that can bind selectively to, or can be polymerized by, a polymerase. Typically, but not necessarily, selective binding of the nucleotide to the polymerase is followed by polymerization of the nucleotide into a nucleic acid strand by the polymerase. Such nucleotides include not only naturally occurring nucleotides but also any analogs, regardless of their structure, that can bind selectively to, or can be polymerized by, a polymerase. While naturally occurring nucleotides typically comprise base, sugar and phosphate moieties, the nucleotides of the present disclosure can include compounds lacking any one, some or all of such moieties. In some embodiments, the nucleotide can optionally include a chain of phosphorus atoms comprising three, four, five, six, seven, eight, nine, ten or more phosphorus atoms. In some embodiments, the phosphorus chain can be attached to any carbon of a sugar ring, such as the 5′ carbon. The phosphorus chain can be linked to the sugar with an intervening O or S. In some embodiments, one or more phosphorus atoms in the chain can be part of a phosphate group having P and O. In some embodiments, the phosphorus atoms in the chain can be linked together with intervening O, NH, S, methylene, substituted methylene, ethylene, substituted ethylene, CNH2, C(O), C(CH2), CH2CH2, or C(OH)CH2R (where R can be a 4-pyridine or 1-imidazole). In some embodiments, the phosphorus atoms in the chain can have side groups having O, BH3, or S. In the phosphorus chain, a phosphorus atom with a side group other than O can be a substituted phosphate group. In the phosphorus chain, phosphorus atoms with an intervening atom other than O can be a substituted phosphate group. Some examples of nucleotide analogs are described in Xu, U.S. Pat. No. 7,405,281.

[0118] Some examples of nucleotides that can be used in the disclosed compositions (and related methods, systems, kits and apparatuses) include, but are not limited to, ribonucleotides, deoxyribonucleotides, modified ribonucleotides, modified deoxyribonucleotides, ribonucleotide polyphosphates, deoxyribonucleotide polyphosphates, modified ribonucleotide polyphosphates, modified deoxyribonucleotide polyphosphates, peptide nucleotides, modified peptide nucleotides, metallonucleosides, phosphonate nucleosides, and modified phosphate-sugar backbone nucleotides, analogs, derivatives, or variants of the foregoing compounds, and the like. In some embodiments, the nucleotide can comprise non-oxygen moieties such as, for example, thio- or borano-moieties, in place of the oxygen moiety bridging the alpha phosphate and the sugar of the nucleotide, or the alpha and beta phosphates of the nucleotide, or the beta and gamma phosphates of the nucleotide, or between any other two phosphates of the nucleotide, or any combination thereof. In some embodiments, a nucleotide can include a purine or pyrimidine base, including adenine, guanine, cytosine, thymine, uracil or inosine. In some embodiments, a nucleotide includes dATP, dGTP, dCTP, dTTP and dUTP.

[0119] In some embodiments, the nucleotide is unlabeled. In some embodiments, the nucleotide comprises a label and referred to herein as a “labeled nucleotide”. In some embodiments, the label can be in the form of a fluorescent dye attached to any portion of a nucleotide including a base, sugar or any intervening phosphate group or a terminal phosphate group, i.e., the phosphate group most distal from the sugar.

[0120] In some embodiments, the disclosure relates generally to compositions, as well as related systems, methods, kits and apparatuses, comprising any one or any combination of capture primers, reverse solution-phase primers, fusion primers, target polynucleotides and/or nucleotides that are non-labeled or attached to at least one label. In some embodiments, the label comprises a detectable moiety. In some embodiments, the label can generate, or cause to generate, a detectable signal. In some embodiments, the detectable signal can be generated from a chemical or physical change (e.g., heat, light, electrical, pH, salt concentration, enzymatic activity, or proximity events). For example, a proximity event can include two reporter moieties approaching each other, or associating with each other, or binding each other. In some embodiments, the detectable signal can be detected optically, electrically, chemically, enzymatically, thermally, or via mass spectroscopy or Raman spectroscopy. In some embodiments, the label can include compounds that are luminescent, photoluminescent, electroluminescent, bioluminescent, chemiluminescent, fluorescent, phosphorescent or electrochemical. In some embodiments, the label can include compounds that are fluorophores, chromophores, radioisotopes, haptens, affinity tags, atoms or enzymes. In some embodiments, the label comprises a moiety not typically present in naturally occurring nucleotides. For example, the label can include fluorescent, luminescent or radioactive moieties.

[0121] In some embodiments, the nucleic acid synthesis reaction includes a cycled amplification reaction, such as a polymerase chain reaction (PCR) (U.S. Pat. Nos. 4,683,195 and 4,683,202 both granted to Mullis). Multiple examples of PCR according to this disclosure are provided below. In some embodiments, the nucleic acid synthesis reaction includes an isothermal reaction, such as an isothermal self-sustained sequence reaction (Kwoh 1989 Proceedings National Academy of Science USA 86:1173-1177; WO 1988/10315; and U.S. Pat. Nos. 5,409,818, 5,399,491, and 5,194,370), or a recombinase polymerase amplification (RPA) (U.S. Pat. No. 5,223,414 to Zarling, U.S. Pat. Nos. 5,273,881 and 5,670,316 both to Sena, and U.S. Pat. Nos. 7,270,981, 7,399,590, 7,435,561, 7,666,598, 7,763,427, 8,017,339, 8,030,000, 8,062,850, and 8,071,308).

[0122] PCR is a nucleic acid synthesis reaction in which the reaction mixture is subjected to reaction cycles, each reaction cycle comprising a denaturation period and at least one annealing and/or extension period, resulting if successful in synthesis of copies of a nucleic acid template in at least the initial cycles, and copies of the copies in at least the later cycles, generally resulting in exponential amplification of the template. In PCR, in some instances, a pair of primers are provided that bind at each end of a target region, on opposite strands such that they each prime synthesis toward the other primer. The reaction is thermocycled so as to drive denaturation of the substrate in a high temperature step, annealing of the primers at a lower temperature step, and extension at a temperature which may be but is not necessarily higher than that of the annealing step. Exponential amplification occurs because the products of one cycle can serve as template in the next cycle.

[0123] An embodiment of isothermal self-sustained sequence reaction, also sometimes referred to as transcription-mediated amplification or TMA, involves synthesizing single-stranded RNA, single-stranded DNA and double-stranded DNA. The single-stranded RNA is a first template for a first primer, the single-stranded DNA is a second template for a second primer, and the double stranded DNA is a third template for synthesis of a plurality of copies of the first template. A sequence of the first primer or the second primer is complementary to a sequence of a target nucleic acid and a sequence of the first primer or the second primer is homologous to a sequence of the target nucleic acid. In an embodiment of an isothermal self-sustained sequence reaction, a first cDNA strand is synthesized by extension of the first primer along the target by an enzyme with RNA-dependent DNA polymerase activity, such as a reverse transcriptase. The first primer can comprise a polymerase binding sequence (PBS) such as a PBS for a DNA-dependent RNA polymerase, such as T7, T3, or SP6 RNA polymerase. The first primer comprising a PBS is sometimes referred to as a promoter-primer. The first cDNA strand is rendered single-stranded, such as by denaturation or by degradation of the RNA, such as by an RNase H. The second primer then anneals to the first cDNA strand and is extended to form a second cDNA strand by a DNA polymerase activity. Forming the second cDNA strand renders the cDNA double-stranded, including the PBS. RNA can then be synthesized from the cDNA, which comprises the PBS, by a DNA-dependent RNA polymerase, such as T7, T3, or SP6 RNA polymerase, thereby providing a template for further events (extension of the first primer, rendering the product single-stranded, extension of the second primer, and RNA synthesis). Exponential amplification occurs because the RNA product can subsequently serve as a template and also because RNA products can be generated repeatedly from a cDNA comprising the PBS.

[0124] An embodiment of RPA can be performed isothermally and employs a recombinase to promote strand invasion of a double-stranded template by forward and reverse primers. The 3′ ends of the primers are extended, displacing template strands at least in part. Subsequent strand invasion/annealing events, including to previously produced extension products, occur and are followed by extension, resulting in amplification. In some embodiments, recombinase activity is supported by the presence of one or more recombinase accessory proteins, such as a recombinase loading protein and/or single-stranded binding protein.

[0125] In some embodiments, the disclosure relates generally to compositions, and related methods, systems, kits and apparatuses, comprising a nucleic acid synthesis reaction (synthesis condition) that can be conducted under thermocycling or isothermal conditions, or a combination of both types of conditions. For example, the synthesis condition can include alternating between thermocycling and isothermal synthesis conditions, in any order.

[0126] In some embodiments thermocycling synthesis conditions comprise a nucleic acid synthesis reaction mixture that is subjected to an elevated temperature for a period of time that is sufficient to denature at least about 30-95% of the double-stranded target nucleic acids, and then subjected to a lower temperature for a period of time that is sufficient to permit hybridization between the single-stranded target nucleic acids and any of the primers (e.g., capture primer, reverse solution-phase primer, or fusion primer). In some embodiments, the increase and decrease temperature cycle is repeated at least once.

[0127] In some embodiments isothermal synthesis conditions comprise a nucleic acid synthesis reaction mixture that is subjected to a temperature variation which is constrained within a limited range during at least some portion of the synthesis, including for example a temperature variation is within about 20° C., or about 10° C., or about 5° C., or about 1-5° C., or about 0.1-1° C., or less than about 0.1° C.

[0128] In some embodiments, an isothermal nucleic acid synthesis reaction can be conducted for about 2, 5, 10, 15, 20, 30, 40, 50, 60 or 120 minutes, or longer. In some embodiments, an isothermal nucleic acid synthesis reaction can be conducted for at least about 2 minutes. In some embodiments, an isothermal nucleic acid synthesis reaction can be conducted for about 120 minutes or less. In some embodiments, an isothermal nucleic acid synthesis reaction can be conducted for about 2 to about 120 minutes. In some embodiments, an isothermal nucleic acid synthesis reaction can be conducted for about 2 to about 60 minutes. In some embodiments, an isothermal nucleic acid synthesis reaction can be conducted for about 60 to about 120 minutes. In some embodiments, an isothermal nucleic acid synthesis reaction can be conducted for about 2 to about 5 minutes. In some embodiments, an isothermal nucleic acid synthesis reaction can be conducted for about 5 to about 10 minutes. In some embodiments, an isothermal nucleic acid synthesis reaction can be conducted for about 10 to about 15 minutes. In some embodiments, an isothermal nucleic acid synthesis reaction can be conducted for about 10 to about 15 minutes. In some embodiments, an isothermal nucleic acid synthesis reaction can be conducted for about 10 to about 15 minutes. In some embodiments, an isothermal nucleic acid synthesis reaction can be conducted for about 15 to about 20 minutes. In some embodiments, an isothermal nucleic acid synthesis reaction can be conducted for about 20 to about 30 minutes. In some embodiments, an isothermal nucleic acid synthesis reaction can be conducted for about 30 to about 40 minutes. In some embodiments, an isothermal nucleic acid synthesis reaction can be conducted for about 40 to about 50 minutes. In some embodiments, an isothermal nucleic acid synthesis reaction can be conducted for about 50 to about 60 minutes.

[0129] In some embodiments, an isothermal nucleic acid synthesis reaction can be conducted at about 15-30° C., or about 30-45° C., or about 45-60° C., or about 60-75° C., or about 75-90° C., or about 90-93° C., or about 93-99° C.

[0130] In some embodiments, the disclosure relates generally to methods, and related compositions, systems, kits and apparatuses, that further include an enrichment step. In some embodiments, an enrichment step comprises a pre-amplification reaction. See, e.g., U.S. Pat. No. 8,815,546 B2. As a nonlimiting example, a pre-amplification reaction may comprise random primers to amplify a portion, even a substantial portion, of the nucleic acid template in a sample. In this manner, the overall amount of nucleic acid template may be increased prior to a sequence-specific nucleic acid synthesis reaction.

[0131] In some embodiments, an amplified population of nucleic acids can include an affinity moiety. For example, in conducting any of the nucleic acid synthesis methods according to the present teachings, a solution-phase/reverse primer that is attached to an affinity moiety (e.g., biotin) can be used to conduct a synthesis reaction to produce an amplified population of nucleic acids that are attached to the affinity moiety. In some embodiments, the enrichment step comprises forming a enrichment complex by binding the affinity moiety (which is attached to the amplified population of nucleic acids) with a purification particle (e.g., paramagnetic bead) that is attached to a receptor moiety (e.g., streptavidin). An example of purification particles include MyOne™ Beads from Dynabeads, which are paramagnetic beads attached to streptavidin. In some embodiments, a magnet can be used to separate/remove the enrichment complex from amplified population of nucleic acids that lack the affinity moiety. In some embodiments, the enrichment step can be repeated at least once. In some embodiment, the enrichment step is followed by one or more washing step.

[0132] In some embodiments, the disclosure relates generally to methods, and related compositions, systems, kits and apparatuses that further include at least one washing step. The washing step can be conducted at any time during the workflow for nucleic acid synthesis. In some embodiments, a washing step can remove excess or unreacted components of the nucleic acid synthesis or enrichment reactions.

[0133] In some embodiments, any of the nucleic acid synthesis methods, or enrichment steps, according to the present teachings, can be conducted manually or by automation. In some embodiments, any one or any combination of the steps can be conducted manually or by automation, including: conducting a nucleic acid synthesis reaction, enriching, and/or washing. For example, any reagents for a nucleic acid synthesis, enrichment or washing, can be deposited into, or removed from, a reaction vessel via manual or automated modes.

[0134] In various embodiments, the disclosure relates to compositions comprising at least one polymerase described herein. In some embodiments, the composition is a hot start composition. In some such embodiments, the composition is a dual hot start composition. In some embodiments, the dual hot start composition comprises at least two different hot start mechanisms that are used to inhibit or substantially inhibit the polymerase activity at a first temperature. Such hot start mechanisms include, but are not limited to, antibodies or combinations of antibodies that block DNA polymerase activity at lower temperatures, antibody mimetics or combinations of antibody mimetics that block DNA polymerase activity at lower temperatures (such as, for example, Affibodies®), oligonucleotides that block DNA polymerase activity at lower temperatures (such as, for example, aptamers), reversible chemical modifications of the DNA polymerase that dissociate at elevated temperatures, amino acid modifications of the DNA polymerase that provide reduced activity at lower temperatures, fusion proteins that include hyperstable DNA binding domains and topoisomerase, other temperature dependent ligands that inhibit the DNA polymerase, single stranded binding proteins that sequester primers at lower temperatures, modified primers or modified dNTPs. Hot start compositions, in some embodiments, comprise at least one polymerase described herein with or without a hot start chemical modification, at least one hot start antibody, at least one hot start aptamer, and/or at least one hot start Affibody®. In some embodiments, a hot start composition comprises at least one polymerase described herein with or without a hot start chemical modification, at least one hot start antibody and at least one hot start aptamer or at least one hot start Affibody®. In some embodiments, a hot start composition comprises at least one polymerase described herein with or without a hot start chemical modification, at least one hot start Affibody® and at least one hot start antibody or at least one hot start aptamer. In some embodiments, a hot start composition comprises a polymerase described herein with or without a hot start chemical modification, a hot start antibody, and a hot start aptamer or a hot start Affibody®. In some embodiments, a hot start composition comprises a polymerase described herein with or without a hot start chemical modification, a hot start Affibody®, and a hot start antibody or a hot start aptamer. In some embodiments, a hot start composition comprises a polymerase described herein with or without a hot start chemical modification, a hot start antibody, and a hot start Affibody®. In some embodiments, a hot start composition comprises a polymerase described herein with or without a hot start chemical modification, a hot start antibody, and a hot start aptamer.

[0135] In some embodiments, a composition comprises one or more detergents, one or more protein stabilizers, and/or at least one UTPase. In some embodiments, a composition comprises one or more detergents, one or more protein stabilizers, and at least one UTPase. In some embodiments, a composition comprises at least one monovalent cationic salt, at least one divalent cationic salt, and/or at least one dNTP. In some embodiments, a composition further comprises at least one dye. In some embodiments, a composition comprises additional stabilizers that increase the density of the composition.

[0136] Nonlimiting exemplary detergents that may be used in the compositions provided herein include nonionic, ionic (anionic, cationic) and zwitterionic detergents. Exemplary such detergents include, but are not limited to, Hecameg (6-O—(N-Heptylcarbamoyl)-methyl-α-D-glucopyranoside), Trition X-200, Brij-58, CHAPS, n-Dodecyl-b-D-maltoside, NP-40, sodium dodecyl sulphate (SDS), TRITON® X-15, TRITON® X-35, TRITON® X-45, TRITON® X-100, TRITON® X-102, TRITON® X-114, TRITON® X-165, TRITON® X-305, TRITON® X-405, TRITON® X-705, Tween® 20 and/or ZWITTERGENT®. Other detergents may also be suitable, as may be determined by one of skill in the art. See, e.g., U.S. Pat. No. 7,972,828B2, U.S. Pat. No. 8,980,333B2 U.S. Publication No. 2008/0145910; U.S. Publication No. 2008/0064071; U.S. Pat. Nos. 6,242,235; 5,871,975; and 6,127,155 for exemplary detergents.

[0137] Nonlimiting exemplary protein stabilizers that may be used in the compositions provided herein include BSA, inactive polymerases (such as inactivated Taq polymerase; see, e.g., US Publication No. 2011/0059490), and apotransferrin. Further nonlimiting exemplary stabilizers that may be used in the compositions provided herein include glycerol, trehalose, lactose, maltose, galactose, glucose, sucrose, dimethyl sulfoxide (DMSO), polyethylene glycol, and sorbitol.

[0138] Nonlimiting exemplary UTPases that may be used in the compositions provided herein include UTPases from thermophilic bacteria. See, e.g., PNAS, 2002, 99: 596-601.

[0139] Nonlimiting exemplary dyes that may be used in the compositions provided herein include xylene cyanol FF, tartrazine, phenol red, quinoline yellow, zylene cyanol, Brilliant Blue, Patent Blue, indigocarmine, acid red 1, m-cresol purple, cresol red, neutral red, bromocresol green, acid violet 5, bromo phenol blue, and orange G (see, e.g., U.S. Pat. No. 8,663,925 B2). Additional nonlimiting exemplary dyes are described, e.g., in U.S. Pat. No. 6,942,964. One skilled in the art will appreciate that any dye that does not inhibit nucleic acid synthesis by the polymerases described herein may be used.

[0140] In some embodiments, a storage composition is provided comprising a polymerase provided herein, at least one hot start antibody, at least one protein stabilizer, and at least one UTPase, in a buffer suitable for storage. In some embodiments, a storage composition is provided comprising a polymerase provided herein, at least one hot start antibody, at least one Affibody®, at least one protein stabilizer, and at least one UTPase, in a buffer suitable for storage. In some embodiments, a storage composition is provided comprising a polymerase provided herein, two hot start antibodies, a protein stabilizer, and a UTPase, in a buffer suitable for storage. In some embodiments, the storage buffer comprises a buffering agent (such as Tris HCl), a salt (such as KCl or NaCl), a stabilizer (such as glycerol), a reducing agent (such as DTT), a divalent cation chelating agent (such as EDTA), and a detergent (such as hecameg and/or Triton X-200 and/or NP-40 and/or Tween-20, etc.). In some embodiments, the storage composition comprises 0.5 to 5 units (U), or 0.5 to 3 U, or 1 to 3 U, or 2 U of polymerase per μl. In some embodiments, the storage composition comprises 0.05 to 1 mg/ml, or 0.05 to 0.5 mg/ml, or 0.1 to 0.5 mg/ml, or 0.1 to 0.3 mg/ml of each hot start antibody. In some embodiments, the storage composition comprises 0.1 to 10 mg/ml, or 0.1 to 5 mg/ml, or 0.5 to 5 mg/ml, or 0.5 to 2 mg/ml of each hot start Affibody®. In some embodiments, the storage composition comprises 0.5 to 5 mg/ml, or 1 to 5 mg/ml, or 1 to 3 mg/ml of each protein stabilizer.

[0141] In some embodiments, a reaction composition is provided, comprising at least one polymerase described herein, at least one buffering agent (such as Tris HCl), at least one monovalent cationic salt (such as KCl or NaCl), at least one divalent cationic salt (such as MgCl₂ or MnCl₂), at least one detergent (such as hecameg and/or Triton X-200 and/or NP-40 and/or Tween-20, etc.), and at least one dNTP. In some embodiments, the composition comprises dATP, dCTP, dGTP, and dTTP. In some embodiments, the reaction composition further comprises at least one dye. In some embodiments, for example when the composition is to be loaded on a gel, the reaction composition comprises additional stabilizers that increase the density of the composition, such as polyethylene glycol (e.g., PEG 4000) and/or sucrose. PEG 4000 may be included, in some embodiments, at a concentration of 0.5-2%, or about 1%; and sucrose may be included, in some embodiments, at a concentration of 1-5%, or 1-3%, or about 2% (or 2-10%, or 2-6%, or about 4% for a 2× reaction composition). In some embodiments, the buffering agent (such as Tris HCl) is present at a concentration of 5-50 mM, or 5-30 mM, or 5-20 mM (or 10-100 mM, or 10-60 mM, or 10-40 mM for a 2× reaction composition). In some embodiments, the monovalent cation (such as K+ or Na+) is present at a concentration of 50-300 mM, or 50-200 mM, or 75-150 mM, or about 110 mM (or 100-600 mM, or 100-400 mM, or 150-300 mM, or about 220 mM for a 2× reaction composition). In some embodiments, a detergent (such as hecameg and/or Triton X-200 and/or NP-40 and/or Tween-20, etc.) is present at a concentration of 0.05-0.3%, or 0.1-0.2%, or about 0.15% (or 0.01-0.6%, or 0.2-0.4%, or about 0.3% for a 2× reaction composition). In some embodiments, the Mg²⁺ or Mn²⁺ is present at a concentration of 0.5-5 mM, or 0.5-3 mM, or about 1.5 mM (or 1-10 mM, or 1-6 mM, or about 3 mM for a 2× reaction composition). In some embodiments, each dNTP is present at a concentration of 0.05-1 mM, or 0.1-0.8 mM, or 0.1-0.6 mM, or 0.1-0.4 mM, or about 0.2 mM (or 0.1-2 mM, or 0.2-1.6 mM, or 0.2-1.2 mM, or 0.2-0.8 mM, or about 0.4 mM for a 2× reaction composition).

[0142] PCR enhancing factors may also be used to improve efficiency of the amplification. As used herein, a “PCR enhancing factor” or a “Polymerase Enhancing Factor” (PEF) refers to a complex or protein possessing polynucleotide polymerase enhancing activity (Hogrefe et al., 1997, Strategies 10:93-96; and U.S. Pat. No. 6,183,997, both of which are hereby incorporated by references). For Pfu DNA polymerase, for example, PEF may comprise either P45 in native form (as a complex of P50 and P45) or as a recombinant protein. In the native complex of Pfu P50 and P45, only P45 exhibits PCR enhancing activity. The P50 protein is similar in structure to a bacterial flavoprotein. The P45 protein is similar in structure to dCTP deaminase and dUTPase, but it functions only as a dUTPase converting dUTP to dUMP and pyrophosphate. PEF, according to the present disclosure, may also be selected from the group consisting of: an isolated or purified naturally occurring polymerase enhancing protein obtained from an archaeabacteria source (e.g., Pyrococcus furiosus); a wholly or partially synthetic protein having the same amino acid sequence as Pfu P45, or analogs thereof possessing polymerase enhancing activity; polymerase-enhancing mixtures of one or more of said naturally occurring or wholly or partially synthetic proteins; polymerase-enhancing protein complexes of one or more of said naturally occurring or wholly or partially synthetic proteins; or polymerase-enhancing partially purified cell extracts containing one or more of said naturally occurring proteins (U.S. Pat. No. 6,183,997, supra).

[0143] In some embodiments, a reaction composition further comprises ingredients that enhance nucleic acid synthesis from high GC-content templates. In some such embodiments, the reaction composition comprises glycerol, DMSO, and/or ammonium sulphate. In some embodiments, the reaction composition comprises glycerol, DMSO, and ammonium sulphate. In some embodiments, glycerol is present in the reaction composition at a concentration of 5-20%, or 5-15%, or about 10%. In some embodiments, DMSO is present in the reaction composition at a concentration of 1-10%, or 3-10%, or 3-7%, or about 5%. In some embodiments, ammonium sulphate is present in the reaction composition at 10-50 mM, or 15-40 mM, or 20-30 mM, or about 25 mM.

[0144] In some embodiments, a reaction composition is provided at 2×, 5×, 10×, etc. concentration, in which case, the concentrations discussed herein are multiplied (e.g., as noted above; doubled for 2×). A 2× reaction composition is typically diluted by 2-fold, for example, when the template nucleic acid and/or primers are added to the composition.

[0145] In some embodiments, a reaction composition comprises nucleic acid template and at least one primer for nucleic acid synthesis. In some embodiments, each primer is included in the reaction composition at a concentration of 0.1-0.8 μM, or 0.1-0.5 μM, or 0.2-0.4 μM, or about 0.3 μM. One skilled in the art will appreciate that the template nucleic acid may be provided at a wide range of concentrations, which lower limit, in some embodiments, may be determined by the sensitivity of the polymerase.

[0146] In some embodiments, the composition comprises at least one PCR inhibitor. In some embodiments, the PCR inhibitor comprises xylan, heparin, humic acid, or SDS. In some embodiments, methods according to the disclosure comprise amplifying DNA in the presence of at least one PCR inhibitor. In some embodiments, the PCR inhibitor comprises xylan. In some embodiments, the PCR inhibitor comprises heparin.

[0147] In various embodiments, the composition may be an aqueous composition. In various embodiments, the composition may be a lyophilized composition. In some embodiments, the composition comprises a cryoprotectant and/or a preservative and/or other additives known to those skilled in the art. Nonlimiting exemplary cryoprotectants and preservatives include, for example, the stabilizers and reducing agents described herein.

Nucleic Acids; Vectors; Host Cells; Methods of Production and/or Purification.

[0148] Provided herein are nucleic acids comprising a sequence encoding a polymerase according to this disclosure. In some embodiments, the nucleic acid is operably linked to a promoter. In some embodiments, the promoter is a promoter for a bacteriophage RNA polymerase, such as a T7 promoter. In some embodiments, the nucleic acid is codon-optimized for expression in a host cell, such as a microorganism, e.g., a bacterium, such as E. coli.

[0149] Also provided herein are vectors comprising any of the nucleic acids comprising a sequence encoding a polymerase according to this disclosure discussed above. In some embodiments, the vector is a plasmid. In some embodiments, the vector is an expression vector. In some embodiments, the vector contains a selectable marker. In some embodiments, the vector is capable of being propagated in a microorganism, e.g., a bacterium, such as E. coli.

[0150] Also provided herein are host cells comprising any of the nucleic acids comprising a sequence encoding a polymerase according to this disclosure discussed above. Also provided herein are host cells comprising any of the vectors comprising a sequence encoding a polymerase according to this disclosure discussed above. In some embodiments, the host cell is a microorganism, e.g., a bacterium, such as E. coli. In some embodiments, the host cell further comprises a nucleic acid encoding a heterologous RNA polymerase. In some embodiments, the heterologous RNA polymerase is a bacteriophage RNA polymerase, such as bacteriophage T7 RNA polymerase. In some embodiments, the heterologous RNA polymerase is operably linked to a promoter, such as an inducible promoter, e.g., a lac-inducible promoter. In some embodiments, the host cell is of a protease-deficient strain. In some embodiments, the host cell is E. coli BL-21. In some embodiments, the host cell, such as BL-21, is modified to carry tRNA genes encoding tRNAs with rarer anticodons (for example, argU, ileY, leuW, and proL tRNA genes).

[0151] Also provided herein are methods of producing and/or purifying a polymerase according to this disclosure. In some embodiments, such a method comprises culturing at least one host cell comprising a nucleic acid encoding a thermophilic DNA polymerase according to this disclosure, wherein the at least one host cell expresses the thermophilic DNA polymerase. In some embodiments, such a method comprises isolating a polymerase according to this disclosure from host cells that have expressed the polymerase. In some embodiments, the isolating comprises lysing the host cells. In some embodiments, the isolating comprises heat treatment to denature host proteins. In some embodiments, denatured host proteins are removed, e.g., by centrifugation. In some embodiments, the polymerase is purified via chromatography. Examples of procedures for purifying DNA polymerases are provided, e.g., in Lawyer et al. (1993, PCR Meth. & App. 2: 275) (designed originally for the isolation of Taq polymerase) and Kong et al. (1993, J. Biol. Chem. 268: 1965) (involving a heat denaturation step of host proteins, and two column purification steps over DEAE-Sepharose and heparin-Sepharose columns).

### EXAMPLES

[0152] The following examples are provided to illustrate certain disclosed embodiments and are not to be construed as limiting the scope of this disclosure in any way.

### Example 1. Tolerance of Inhibitors by a Thermophilic DNA Polymerase According to the Disclosure

[0153] The inhibitor resistance of a thermophilic DNA polymerase with the sequence of SEQ ID NO: 20 (including a Q at position 762) (762Q polymerase) was compared to a version with a K at position 762 (762K polymerase) by amplifying PCR fragments in the presence of various amounts of polymerase inhibitors. The performance of a thermophilic DNA polymerase with the sequence of SEQ ID NO: 22 (including a Q at position 762 and S at position 408) (408S 762Q polymerase) was compared to a version with a K at position 762 (408S 762K polymerase) by amplifying PCR fragments in the presence of various amounts of polymerase inhibitors.

[0154] Heparin. A 2 kb fragment was amplified from 20 ng of human genomic DNA template in 20 μl PCR reactions in the presence of 0 to 0.3 μM of heparin using the thermophilic DNA polymerases (FIG. 1). Primers with the following sequences were used: GAAGAGCCAAGGACAGGTAC (SEQ ID NO: 64) (forward); CCTCCAAATCAAGCCTCTAC (SEQ ID NO: 65) (reverse). The PCR program was as follows:

[chemical structure]

[0155] Products were detected by agarose gel electrophoresis and staining with Ethidium bromide. Detectable product was observed at up to 0.25 μM heparin for the 762Q polymerase and 0.15 μM for 408S 762Q polymerase. Products were not detected at or above 0.1 μM heparin for the 762K and 408S 762K polymerases.

[0156] Xylan. A 2 kb fragment was amplified from 40 ng of human genomic DNA template in 20 μl PCR reactions in the presence of 0 to 400 ng/μl xylan using the thermophilic DNA polymerases (FIG. 2). The primers, PCR program, and product detection were as described above with respect to heparin.

[0157] Detectable product was observed at up to 400 ng/μl xylan for the 762Q polymerase. Products were not detected at 400 ng/μl xylan for the 762K polymerases.

[0158] Humic acid. A 2 kb fragment was amplified from 40 ng of human genomic DNA template in 20 μl PCR mixture in the presence of 0 to 1.0 ng/ml of humic acid using a thermophilic DNA polymerase with the sequence of SEQ ID NO: 20 (including a Q at position 762) was compared to a version with a K at position 762 (FIG. 3). Primers, the PCR program, and product detection were as described above with respect to heparin.

[0159] Sodium dodecyl sulfate. A 2 kb fragment was amplified from 40 ng of human genomic DNA template in 20 μl PCR mixture in the presence of 0 to 0.016% or 0.2% (w/v) sodium dodecyl sulfate (SDS) using the 762Q or 762K polymerases (FIG. 4). The primers, PCR program, and product detection were as described above with respect to heparin.

[0160] Thus, increased inhibitor tolerance was observed for the polymerases with a Q at position 762.

### Example 2. Yield and Sensitivity of PCR with a Thermophilic DNA Polymerase According to the Disclosure

[0161] The PCR performance (sensitivity and yield) of the 762Q and 762K polymerases discussed in Example 1 were compared by amplifying PCR fragments from various amounts of DNA template.

[0162] Sensitivity. A 2 kb fragment was amplified from a series of amounts of human genomic DNA template between 0 and 400 ng in a 20 μl PCR mixture using the thermophilic DNA polymerases (FIG. 5). The primers and the PCR program were the same as those used in Example 1. Products were analyzed by agarose gel electrophoresis and stained as in Example 1.

[0163] The results showed that the reaction with the 762Q polymerase had higher sensitivity (amplification from lower amounts of template DNA) than with the 762K polymerase, and the reaction with the 408S 762Q polymerase had higher sensitivity than with the 408S 762K polymerase.

[0164] Yield A 10 kb fragment was amplified from a series of amounts of phage lambda DNA template between 0 and 200 ng in a 20 μl PCR mixture using the thermophilic DNA polymerases. The primers were: CAGTGCAGTGCTTGATAACAGG (SEQ ID NO: 66) (forward) and GTAGTGCGCGTTTGATTTCC (SEQ ID NO: 67) (reverse). The PCR program was:

[chemical structure]

[0165] Products were analyzed by agarose gel electrophoresis and stained as in Example 1. The results from two experiments showed that the reaction sensitivity (amplification from lower amounts of template DNA) was similar for all the polymerases (FIG. 6A), while the 762Q polymerase showed the highest yield (140% from the 762K polymerase) amplifying the 10 kb fragment from 0.5 ng of the template (FIG. 6B).

### Example 3. Fidelity of Thermophilic DNA Polymerases According to the Disclosure

[0166] Polymerase fidelity was measured by next generation sequencing. Fragmented E. coli DNA (˜300 bp) was amplified by Taq polymerase, 762K polymerase, 762Q polymerase, 408S 762K polymerase and 408S 762Q polymerase. The number of effective PCR cycles was found by qPCR. The amplified libraries were subjected to paired-end Illumina sequencing together with control E. coli PCR-free libraries. The polymerase error rates were calculated using bioinformatics techniques. The background level of experimental errors was estimated from PCR-free library sequencing data. The polymerase introduced errors were identified as nucleotide changes in both pair-end reads, while nucleotide changes in only pair-end one read have been treated as instrumental errors and were eliminated. The polymerase fidelities (1/error rate) were normalized to the fidelity of Taq polymerase, which fidelity value is indicated as 1×.

[0167] The fidelity of the 762K polymerase was ˜50× of the Taq polymerase, the 762Q polymerase also showed similar fidelity (Table 1). The error rates for the 408S 762K and A408S 762Q polymerases were almost indistinguishable from the background, which indicate >100× fidelity of the Taq polymerase and is the threshold of fidelity measurements using this particular experimental setup. A thermophilic DNA polymerase with the sequence of SEQ ID NO: 95 (including a H at position 36, S at a position 408 and Q at position 762; “36H 408S 762Q polymerase”) was also found to have a fidelity of >100× of the Taq polymerase.

TABLE 1

| Polymerase | Fidelity, xTaq polymerase fidelity |
|---|---|
| Taq | 1 x |
| 762K | 20-70 x |
| 762Q | 20-70 x |
| 408S 762K | >100 x * |
| 408S 762Q | >100 x * |

* 100 x Taq fidelity is the threshold of fidelity measurements

### Example 4. Yield and Sensitivity of PCR with a Thermophilic DNA Polymerase According to the Disclosure Provided as Hot-Start Compositions

[0168] The performance of a thermophilic DNA polymerase with the sequence of SEQ ID NO: 22 (including a Q at position 762 and S at position 408) (408S 762Q polymerase) was compared to a version with a K at position 762 (408 S 762K polymerase) by amplifying various PCR fragments, with the polymerases being provided as dual hot-start compositions. A dUTPase was also supplied in the reactions.

[0169] 2 kb fragment from human genomic DNA template. The template was human genomic DNA in a series of amounts between 0 and 400 ng in 20 μl reactions. The primers and the PCR program were the same as in Example 1.

[0170] The 408S 762Q polymerase showed increased yield and higher sensitivity relative to the 408S (FIG. 7A).

[0171] 5 kb fragment from phage lambda DNA template. PCR primers were CCTGCTCTGCCGCTTCACGC (SEQ ID NO: 68) (forward) and CGAACGTCGCGCAGAGAAACAGG (SEQ ID NO: 69) (reverse). The PCR program was:

[chemical structure]

[0172] Lambda DNA was provided as template at amounts between 0 and 200 ng in 20 μl reactions. Products were analyzed by agarose gel electrophoresis and stained as in Example 1. Sensitivity was higher for reactions with the 408S 762Q polymerase (FIG. 7B).

[0173] 20 kb fragment from phage lambda DNA template. PCR primers were CTGATGAGTTCGTGTCCGTACAACTGGCGTAATC (SEQ ID NO: 70) (forward) and GTGCACCATGCAACATGAATAACAGTGGGTTATC (SEQ ID NO: 71) (reverse). The PCR program was:

[chemical structure]

[0174] Lambda DNA was provided as template at amounts between 0 and 100 ng in 20 μl reactions. Products were analyzed by agarose gel electrophoresis and stained as in Example 1. Band intensities from lower amounts of the template were generally greater for reactions with the 408S 762Q polymerase, indicating increased yield and sensitivity (FIG. 8).

[0175] 20 kb fragment from Escherichia coli genomic DNA template. PCR primers were: GGGCGTTTTCCGTAACACTG (SEQ ID NO: 72) (forward) and TGACCACATACAATCGCCGT (SEQ ID NO: 73) (reverse). The PCR program was:

[chemical structure]

[0176] E. coli gDNA template was provided as template at amounts between 0 and 40 ng in 20 μl reactions. Products were analyzed by agarose gel electrophoresis and stained as in Example 1.

[0177] Band intensities from lower amounts of the template were generally greater for reactions with the 408S 762Q polymerase, indicating increased yield and sensitivity (FIG. 9).

[0178] 7.5 kb fragment from human genomic DNA template. The template was human genomic DNA in a series of amounts between 0 and 400 ng in 20 μl reactions. Primers were: CTCCACAGGGTGAGGTCTAAGTGATGACA (SEQ ID NO: 74) (forward) and CAATCTCAGGGCAAGTTAAGGGAATAGTG (SEQ ID NO: 75) (reverse). The PCR program was:

[chemical structure]

[0179] Band intensities were greater for reactions with the 408S 762Q polymerase, indicating increased yield and sensitivity (FIG. 10).

### Example 5. Fidelity of Thermophilic DNA Polymerases Provided as Hot-Start Compositions

[0180] Polymerase fidelity was measured by next generation sequencing. Fragmented E. coli DNA (˜300 bp) was amplified by Taq polymerase, 408S polymerase, and 408S 762Q polymerase with the polymerases being provided as dual hot-start compositions, including affibodies and antibodies. A dUTPase was also supplied in the reactions. Polymerase fidelities were measured as in the Example 3.

[0181] The error rates for the 408S and 408S 762Q polymerases were almost indistinguishable from the background, which indicate >100× fidelity of the Taq polymerase and is the threshold of fidelity measurements using this particular experimental setup (Table 2).

TABLE 2

| Polymerase | Fidelity, xTaq polymerase fidelity |
|---|---|
| Taq | 1 x |
| 408S | >100 x * |
| 408S 762Q | >100 x * |

* 100 x Taq fidelity is the threshold of fidelity measurements

### Example 6. Tolerance of dUTP by a Thermophilic DNA Polymerase According to the Disclosure

[0182] Tolerance of dUTP as a replacement for dTTP of a thermophilic DNA polymerase with the sequence of SEQ ID NO: 95 (including a H at position 36, S at a position 408 and Q at position 762; “36H 408S 762Q polymerase”) was performed amplifying a 2 kb fragment of human genomic DNA.

[0183] dUTP replacement of dTTP (2 nal MgCl2). 2 kb fragment of human genomic DNA was amplified from 200 ng of human genomic DNA template in 50 μl PCR reactions in the presence of dATP, dCTP, and dGTP (each 200 μM) and variable amounts of dUTP replacing dTTP (the final concentration of dUTP and dTTP was 200 μM) (FIG. 13). Primers with the following sequences were used:

(forward)
(SEQ ID NO: 64)
GAAGAGCCAAGGACAGGTAC
(reverse)
(SEQ ID NO: 65)
CCTCCAAATCAAGCCTCTAC

[0184] The PCR program was as follows:

[chemical structure]

[0185] Products were detected by agarose gel electrophoresis and staining with ethidium bromide. Detectable product was observed at up to when 60 μM dTTP was replaced with dUTP (FIG. 13).

[0186] dUTP replacement of dTTP (1.5 mM MgCl₂). 5 kb fragment of human genomic DNA was amplified from 200 ng of human genomic DNA template in 50 μl PCR reactions in the presence of dATP; dCTP, and dGTP (each 200 μM) and variable amounts of dUTP replacing dTTP (the final concentration of dUTP and dTTP was 200 μM) (FIG. 14). Primers with the following sequences were used:

(forward)
(SEQ ID NO: 170)
CCAACATGGCGAAATGCTGT
(reverse)
(SEQ ID NO: 171)
CATCAACAACACGGTCAGCC

[0187] The PCR program was as follows:

[chemical structure]

[0188] Products were detected by agarose gel electrophoresis and staining with ethidium bromide. Detectable product was observed at up to when 140 μM dTTP was replaced with dUTP (FIG. 14).

[0189] Additional dUTP. The PCR performance of the 36H 408S 762Q DNA polymerase and thermophilic DNA polymerase with the sequence of SEQ ID NO: 169 (including a H at position 36; “36H polymerase”) were compared by amplifying 2 kb PCR fragments from 200 ng of human genomic DNA template in 50 μl PCR reactions in the presence of four standard dNTPs (each 200 μM) and increasing amounts of dUTP (from 0 μM to 200 μM) (FIG. 15; the 180 μM dUTP lane for the 36H 408S 762Q DNA polymerase appeared to have technical issues). The primers, PCR program, and product detection were as described above for the 2 kb human genomic fragment amplification in which dUTP replaced varying amounts of dTTP.

[0190] Easily detectable amounts of PCR product was observed even in the presence of 200 μM dUTP for the 36H 408S 762Q DNA polymerase. It is believed that the 36H 408S 762Q DNA polymerase would still produce detectable amounts of PCR product in the presence of dUTP concentrations of 220-260 μM. PCR products were not detected at 200 μM dUTP for 36H DNA polymerase.

[0191] The results showed that 36H 408S 762Q DNA polymerase can use dUTP as a replacement of dTTP in dNTPs mixture and has higher additional dUTP tolerance compared to 36H DNA polymerase.

### Example 7. Performance of 36H 408S 762Q DNA Polymerase in Multiplex Reactions and Tolerance of High Primer Concentration

[0192] The tolerance of high primer concentration of the 36H 408S 762Q DNA polymerase was assessed by amplifying regions of human gnomic DNA template with 4 or 5 primer pairs in a multiplex PCR reaction. 8 ng of human genomic DNA template was used in 20 μl PCR reactions. Total primer concentration 5 μM to 100 μM was tested (FIG. 16). Primers with the following sequences were used:

99 bp amplicon
(forward)
(SEQ ID NO: 172)
CCCACAGTTGGTAGGCATCA
(reverse)
(SEQ ID NO: 173)
TTGCTCAGCAACAAGTTGGC
131 bp amplicon
(forward)
(SEQ ID NO: 174)
TCATGTTGGACGGATGGCTG
(reverse)
(SEQ ID NO: 175)
CGGGCTGTCTTCATCACCTC
160 bp amplicon
(forward)
(SEQ ID NO: 176)
ACCATGTGAGACGCTAATCCA
(reverse)
(SEQ ID NO: 122)
ACCTGGGAGGCTTTTCTGTA
199 bp amplicon
(forward)
(SEQ ID NO: 123)
GTTTATGGAGGTCCTCTTGTGTCC
(reverse)
(SEQ ID NO: 124)
GGGTCAACGCTAGGCTGGCAG
250 bp amplicon
(forward)
(SEQ ID NO: 125)
TCTGGACGGGCATCTCAAGT
(reverse)
(SEQ ID NO: 126)
TTCACAGGAAGCACTCACCA

[0193] The PCR program was as follows:

[chemical structure]

Products were analyzed by agarose gel electrophoresis and stained as in Example 6.

[0194] With both 4 and 5 primer pairs, all PCR products were detectable, indicating that the 36H 408S 762Q DNA polymerase tolerated high primer concentrations (FIG. 16). Reasonably even amplification was observed using multiple primer pairs, thus making this polymerase suitable for various multiplex PCR applications, for example, amplification of DNA for next-generation sequencing.

Table of Sequences

| SEQ | | |
|---|---|---|
| ID | | |
| NO | Description | Sequence |
| 1 | pfu DNA polymerase | MILDVDYITE EGKPVIRLFK KENGKFKIEH DRTFRPYIYA |
| | (GenBank Acc. No. | LLRDDSKIEE VKKITGERHG KIVRIVDVEK VEKKFLGKPI |
| | WP_011011325.1) amino acid | TVWKLYLEHP QDVPTIREKV REHPAVVDIF EYDIPFAKRY |
| | sequence | LIDKGLIPME GEEELKILAF DIETLYHEGE EFGKGPIIMI |
| | | SYADENEAKV ITWKNIDLPY VEVVSSEREM IKRFLRIIRE |
| | | KDPDIIVTYN GDSFDFPYLA KRAEKLGIKL TIGRDGSEPK |
| | | MQRIGDMTAV EVKGRIHFDL YHVITRTINL PTYTLEAVYE |
| | | AIFGKPKEKV YADEIAKAWE SGENLERVAK YSMEDAKATY |
| | | ELGKEFLPME IQLSRLVGQP LWDVSRSSTG NLVEWFLLRK |
| | | AYERNEVAPN KPSEEEYQRR LRESYTGGFV KEPEKGLWEN |
| | | IVYLDFRALY PSIIITHNVS PDTLNLEGCK NYDIAPQVGH |
| | | KFCKDIPGFI PSLLGHLLEE RQKIKTKMKE TQDPIEKILL |
| | | DYRQKAIKLL ANSFYGYYGY AKARWYCKEC AESVTAWGRK |
| | | YIELVWKELE EKFGFKVLYI DTDGLYATIP GGESEEIKKK |
| | | ALEFVKYINS KLPGLLELEY EGFYKRGFFV TKKRYAVIDE |
| | | EGKVITRGLE IVRRDWSEIA KETQARVLET ILKHGDVEEA |
| | | VRIVKEVIQK LANYEIPPEK LAIYEQITRP LHEYKAIGPH |
| | | VAVAKKLAAK GVKIKPGMVI GYIVLRGDGP ISNRAILAEE |
| | | YDPKKHKYDA EYYIENQVLP AVLRILEGFG YRKEDLRYQK |
| | | TRQVGLTSWL NIKKS |
| 2 | Pfu GenBank | MILDVDYITE EGKPVIRLFK KENGKFKIEH DRTFRPYIYA |
| | WP_011011325.1 R762X | LLRDDSKIEE VKKITGERHG KIVRIVDVEK VEKKFLGKPI |
| | amino acid sequence | TVWKLYLEHP QDVPTIREKV REHPAVVDIF EYDIPFAKRY |
| | | LIDKGLIPME GEEELKILAF DIETLYHEGE EFGKGPIIMI |
| | | SYADENEAKV ITWKNIDLPY VEVVSSEREM IKRFLRIIRE |
| | | KDPDIIVTYN GDSFDFPYLA KRAEKLGIKL TIGRDGSEPK |
| | | MQRIGDMTAV EVKGRIHFDL YHVITRTINL PTYTLEAVYE |
| | | AIFGKPKEKV YADEIAKAWE SGENLERVAK YSMEDAKATY |
| | | ELGKEFLPME IQLSRLVGQP LWDVSRSSTG NLVEWFLLRK |
| | | AYERNEVAPN KPSEEEYQRR LRESYTGGFV KEPEKGLWEN |
| | | IVYLDFRALY PSIIITHNVS PDTLNLEGCK NYDIAPQVGH |
| | | KFCKDIPGFI PSLLGHLLEE RQKIKTKMKE TQDPIEKILL |
| | | DYRQKAIKLL ANSFYGYYGY AKARWYCKEC AESVTAWGRK |
| | | YIELVWKELE EKFGFKVLYI DTDGLYATIP GGESEEIKKK |
| | | ALEFVKYINS KLPGLLELEY EGFYKRGFFV TKKRYAVIDE |
| | | EGKVITRGLE IVRRDWSEIA KETQARVLET ILKHGDVEEA |
| | | VRIVKEVIQK LANYEIPPEK LAIYEQITRP LHEYKAIGPH |
| | | VAVAKKLAAK GVKIKPGMVI GYIVLRGDGP ISNRAILAEE |
| | | YDPKKHKYDA EYYIENQVLP AVLRILEGFG YRKEDLRYQK |
| | | TXQVGLTSWL NIKKS; |
| | | wherein X is selected from Q, N, H, S, T, Y, |
| | | C, M, W, A, I, L, F, V, P, and G; in some |
| | | embodiments, X is selected from Q and N. |
| 3 | Pfu GenBank | MILDVDYITE EGKPVIRLFK KENGKFKIEH DRTFRPYIYA |
| | WP_011011325.1 R762Q | LLRDDSKIEE VKKITGERHG KIVRIVDVEK VEKKFLGKPI |
| | amino acid sequence | TVWKLYLEHP QDVPTIREKV REHPAVVDIF EYDIPFAKRY |
| | | LIDKGLIPME GEEELKILAF DIETLYHEGE EFGKGPIIMI |
| | | SYADENEAKV ITWKNIDLPY VEVVSSEREM IKRFLRIIRE |
| | | KDPDIIVTYN GDSFDFPYLA KRAEKLGIKL TIGRDGSEPK |
| | | MQRIGDMTAV EVKGRIHFDL YHVITRTINL PTYTLEAVYE |
| | | AIFGKPKEKV YADEIAKAWE SGENLERVAK YSMEDAKATY |
| | | ELGKEFLPME IQLSRLVGQP LWDVSRSSTG NLVEWFLLRK |
| | | AYERNEVAPN KPSEEEYQRR LRESYTGGFV KEPEKGLWEN |
| | | IVYLDFRALY PSIIITHNVS PDTLNLEGCK NYDIAPQVGH |
| | | KFCKDIPGFI PSLLGHLLEE RQKIKTKMKE TQDPIEKILL |
| | | DYRQKAIKLL ANSFYGYYGY AKARWYCKEC AESVTAWGRK |
| | | YIELVWKELE EKFGFKVLYI DTDGLYATIP GGESEEIKKK |
| | | ALEFVKYINS KLPGLLELEY EGFYKRGFFV TKKRYAVIDE |
| | | EGKVITRGLE IVRRDWSEIA KETQARVLET ILKHGDVEEA |
| | | VRIVKEVIQK LANYEIPPEK LAIYEQITRP LHEYKAIGPH |
| | | VAVAKKLAAK GVKIKPGMVI GYIVLRGDGP ISNRAILAEE |
| | | YDPKKHKYDA EYYIENQVLP AVLRILEGFG YRKEDLRYQK |
| | | TQQVGLTSWL NIKKS |
| 4 | Pfu GenBank | MILDVDYITE EGKPVIRLFK KENGKFKIEH DRTFRPYIYA |
| | WP_011011325.1 A408S | LLRDDSKIEE VKKITGERHG KIVRIVDVEK VEKKFLGKPI |
| | R762X amino acid sequence | TVWKLYLEHP QDVPTIREKV REHPAVVDIF EYDIPFAKRY |
| | | LIDKGLIPME GEEELKILAF DIETLYHEGE EFGKGPIIMI |
| | | SYADENEAKV ITWKNIDLPY VEVVSSEREM IKRFLRIIRE |
| | | KDPDIIVTYN GDSFDFPYLA KRAEKLGIKL TIGRDGSEPK |
| | | MQRIGDMTAV EVKGRIHFDL YHVITRTINL PTYTLEAVYE |
| | | AIFGKPKEKV YADEIAKAWE SGENLERVAK YSMEDAKATY |
| | | ELGKEFLPME IQLSRLVGQP LWDVSRSSTG NLVEWFLLRK |
| | | AYERNEVAPN KPSEEEYQRR LRESYTGGFV KEPEKGLWEN |
| | | IVYLDFRSLY PSIIITHNVS PDTLNLEGCK NYDIAPQVGH |
| | | KFCKDIPGFI PSLLGHLLEE RQKIKTKMKE TQDPIEKILL |
| | | DYRQKAIKLL ANSFYGYYGY AKARWYCKEC AESVTAWGRK |
| | | YIELVWKELE EKFGFKVLYI DTDGLYATIP GGESEEIKKK |
| | | ALEFVKYINS KLPGLLELEY EGFYKRGFFV TKKRYAVIDE |
| | | EGKVITRGLE IVRRDWSEIA KETQARVLET ILKHGDVEEA |
| | | VRIVKEVIQK LANYEIPPEK LAIYEQITRP LHEYKAIGPH |
| | | VAVAKKLAAK GVKIKPGMVI GYIVLRGDGP ISNRAILAEE |
| | | YDPKKHKYDA EYYIENQVLP AVLRILEGFG YRKEDLRYQK |
| | | TXQVGLTSWL NIKKS; |
| | | wherein X is selected from Q, N, H, S, T, Y, |
| | | C, M, W, A, I, L, F, V, P, and G; in some |
| | | embodiments, X is selected from Q and N. |
| 5 | Pfu GenBank | MILDVDYITE EGKPVIRLFK KENGKFKIEH DRTFRPYIYA |
| | WP_011011325.1 A408S | LLRDDSKIEE VKKITGERHG KIVRIVDVEK VEKKFLGKPI |
| | R762Q amino acid sequence | TVWKLYLEHP QDVPTIREKV REHPAVVDIF EYDIPFAKRY |
| | | LIDKGLIPME GEEELKILAF DIETLYHEGE EFGKGPIIMI |
| | | SYADENEAKV ITWKNIDLPY VEVVSSEREM IKRFLRIIRE |
| | | KDPDIIVTYN GDSFDFPYLA KRAEKLGIKL TIGRDGSEPK |
| | | MQRIGDMTAV EVKGRIHFDL YHVITRTINL PTYTLEAVYE |
| | | AIFGKPKEKV YADEIAKAWE SGENLERVAK YSMEDAKATY |
| | | ELGKEFLPME IQLSRLVGQP LWDVSRSSTG NLVEWFLLRK |
| | | AYERNEVAPN KPSEEEYQRR LRESYTGGFV KEPEKGLWEN |
| | | IVYLDFRSLY PSIIITHNVS PDTLNLEGCK NYDIAPQVGH |
| | | KFCKDIPGFI PSLLGHLLEE RQKIKTKMKE TQDPIEKILL |
| | | DYRQKAIKLL ANSFYGYYGY AKARWYCKEC AESVTAWGRK |
| | | YIELVWKELE EKFGFKVLYI DTDGLYATIP GGESEEIKKK |
| | | ALEFVKYINS KLPGLLELEY EGFYKRGFFV TKKRYAVIDE |
| | | EGKVITRGLE IVRRDWSEIA KETQARVLET ILKHGDVEEA |
| | | VRIVKEVIQK LANYEIPPEK LAIYEQITRP LHEYKAIGPH |
| | | VAVAKKLAAK GVKIKPGMVI GYIVLRGDGP ISNRAILAEE |
| | | YDPKKHKYDA EYYIENQVLP AVLRILEGFG YRKEDLRYQK |
| | | TQQVGLTSWL NIKKS |
| 6 | Pfu DNA polymerase | SYTGGFV KEPEKGLWEN IVYLDFRALY PSIIITHNVS |
| | (GenBank Acc. No. | PDTLNLEGCK NYDIAPQVGH KFCKDIPGFI PSLLGHLLEE |
| | WP_011011325.1), catalytic | RQKIKTKMKE TQDPIEKILL DYRQKAIKLL ANSFYGYYGY |
| | domain amino acid sequence | AKARWYCKEC AESVTAWGRK YIELVWKELE EKFGFKVLYI |
| | | DTDGLYATIP GGESEEIKKK ALEFVKYINS KLPGLLELEY |
| | | EGFYKRGFFV TKKRYAVIDE EGKVITRGLE IVRRDWSEIA |
| | | KETQARVLET ILKHGDVEEA VRIVKEVIQK LANYEIPPEK |
| | | LAIYEQITRP LHEYKAIGPH VAVAKKLAAK GVKIKPGMVI |
| | | GYIVLRGDGP ISNRAILAEE YDPKKHKYDA EYYIENQVLP |
| | | AVLRILEGFG YRKEDLRYQK TRQVGL |
| 7 | Pfu DNA polymerase | SYTGGFV KEPEKGLWEN IVYLDFRALY PSIIITHNVS |
| | (GenBank Acc. No. | PDTLNLEGCK NYDIAPQVGH KFCKDIPGFI PSLLGHLLEE |
| | WP_011011325.1) catalytic | RQKIKTKMKE TQDPIEKILL DYRQKAIKLL ANSFYGYYGY |
| | domain R762X amino acid | AKARWYCKEC AESVTAWGRK YIELVWKELE EKFGFKVLYI |
| | sequence | DTDGLYATIP GGESEEIKKK ALEFVKYINS KLPGLLELEY |
| | | EGFYKRGFFV TKKRYAVIDE EGKVITRGLE IVRRDWSEIA |
| | | KETQARVLET ILKHGDVEEA VRIVKEVIQK LANYEIPPEK |
| | | LAIYEQITRP LHEYKAIGPH VAVAKKLAAK GVKIKPGMVI |
| | | GYIVLRGDGP ISNRAILAEE YDPKKHKYDA EYYIENQVLP |
| | | AVLRILEGFG YRKEDLRYQK TXQVGL; |
| | | wherein X is selected from Q, N, H, S, T, Y, |
| | | C, M, W, A, I, L, F, V, P, and G; in some |
| | | embodiments, X is selected from Q and N. |
| 8 | Pfu DNA polymerase | SYTGGFV KEPEKGLWEN IVYLDFRSLY PSIIITHNVS |
| | (GenBank Acc. No. | PDTLNLEGCK NYDIAPQVGH KFCKDIPGFI PSLLGHLLEE |
| | WP_011011325.1) catalytic | RQKIKTKMKE TQDPIEKILL DYRQKAIKLL ANSFYGYYGY |
| | domain A408S R762X amino | AKARWYCKEC AESVTAWGRK YIELVWKELE EKFGFKVLYI |
| | acid sequence | DTDGLYATIP GGESEEIKKK ALEFVKYINS KLPGLLELEY |
| | | EGFYKRGFFV TKKRYAVIDE EGKVITRGLE IVRRDWSEIA |
| | | KETQARVLET ILKHGDVEEA VRIVKEVIQK LANYEIPPEK |
| | | LAIYEQITRP LHEYKAIGPH VAVAKKLAAK GVKIKPGMVI |
| | | GYIVLRGDGP ISNRAILAEE YDPKKHKYDA EYYIENQVLP |
| | | AVLRILEGFG YRKEDLRYQK TXQVGL; |
| | | wherein X is selected from Q, N, H, S, T, Y, |
| | | C, M, W, A, I, L, F, V, P, and G; in some |
| | | embodiments, X is selected from Q and N. |
| 9 | Pfu DNA polymerase | SYTGGFV KEPEKGLWEN IVYLDFRALY PSIIITHNVS |
| | (GenBank Acc. No. | PDTLNLEGCK NYDIAPQVGH KFCKDIPGFI PSLLGHLLEE |
| | WP_011011325.1) catalytic | RQKIKTKMKE TQDPIEKILL DYRQKAIKLL ANSFYGYYGY |
| | domain R762Q amino acid | AKARWYCKEC AESVTAWGRK YIELVWKELE EKFGFKVLYI |
| | sequence | DTDGLYATIP GGESEEIKKK ALEFVKYINS KLPGLLELEY |
| | | EGFYKRGFFV TKKRYAVIDE EGKVITRGLE IVRRDWSEIA |
| | | KETQARVLET ILKHGDVEEA VRIVKEVIQK LANYEIPPEK |
| | | LAIYEQITRP LHEYKAIGPH VAVAKKLAAK GVKIKPGMVI |
| | | GYIVLRGDGP ISNRAILAEE YDPKKHKYDA EYYIENQVLP |
| | | AVLRILEGFG YRKEDLRYQK TQQVGL |
| 10 | Pfu DNA polymerase | SYTGGFV KEPEKGLWEN IVYLDFRSLY PSIIITHNVS |
| | (GenBank Acc. No. | PDTLNLEGCK NYDIAPQVGH KFCKDIPGFI PSLLGHLLEE |
| | WP_011011325.1) catalytic | RQKIKTKMKE TQDPIEKILL DYRQKAIKLL ANSFYGYYGY |
| | domain A408S R762Q amino | AKARWYCKEC AESVTAWGRK YIELVWKELE EKFGFKVLYI |
| | acid sequence | DTDGLYATIP GGESEEIKKK ALEFVKYINS KLPGLLELEY |
| | | EGFYKRGFFV TKKRYAVIDE EGKVITRGLE IVRRDWSEIA |
| | | KETQARVLET ILKHGDVEEA VRIVKEVIQK LANYEIPPEK |
| | | LAIYEQITRP LHEYKAIGPH VAVAKKLAAK GVKIKPGMVI |
| | | GYIVLRGDGP ISNRAILAEE YDPKKHKYDA EYYIENQVLP |
| | | AVLRILEGFG YRKEDLRYQK TQQVGL |
| 11 | Pfu GenBank | MILDVDYITE EGKPVIRLFK KENGKFKIEH DRTFRPYIYA |
| | WP_011011325.1 R762X with | LLRDDSKIEE VKKITGERHG KIVRIVDVEK VEKKFLGKPI |
| | DNA binding domain amino | TVWKLYLEHP QDVPTIREKV REHPAVVDIF EYDIPFAKRY |
| | acid sequence | LIDKGLIPME GEEELKILAF DIETLYHEGE EFGKGPIIMI |
| | | SYADENEAKV ITWKNIDLPY VEVVSSEREM IKRFLRIIRE |
| | | KDPDIIVTYN GDSFDFPYLA KRAEKLGIKL TIGRDGSEPK |
| | | MQRIGDMTAV EVKGRIHFDL YHVITRTINL PTYTLEAVYE |
| | | AIFGKPKEKV YADEIAKAWE SGENLERVAK YSMEDAKATY |
| | | ELGKEFLPME IQLSRLVGQP LWDVSRSSTG NLVEWFLLRK |
| | | AYERNEVAPN KPSEEEYQRR LRESYTGGFV KEPEKGLWEN |
| | | IVYLDFRALY PSIIITHNVS PDTLNLEGCK NYDIAPQVGH |
| | | KFCKDIPGFI PSLLGHLLEE RQKIKTKMKE TQDPIEKILL |
| | | DYRQKAIKLL ANSFYGYYGY AKARWYCKEC AESVTAWGRK |
| | | YIELVWKELE EKFGFKVLYI DTDGLYATIP GGESEEIKKK |
| | | ALEFVKYINS KLPGLLELEY EGFYKRGFFV TKKRYAVIDE |
| | | EGKVITRGLE IVRRDWSEIA KETQARVLET ILKHGDVEEA |
| | | VRIVKEVIQK LANYEIPPEK LAIYEQITRP LHEYKAIGPH |
| | | VAVAKKLAAK GVKIKPGMVI GYIVLRGDGP ISNRAILAEE |
| | | YDPKKHKYDA EYYIENQVLP AVLRILEGFG YRKEDLRYQK |
| | | TXQVGLTSWL NIKKSGTGGG GATVKFKYKG EEKEVDISKI |
| | | KKVWRVGKMI SFTYDEGGGK TGRGAVSEKD APKELLQMLE |
| | | KQKK; |
| | | wherein X is selected from Q, N, H, S, T, Y, |
| | | C, M, W, A, I, L, F, V, P, and G; in some |
| | | embodiments, X is selected from Q and N. |
| 12 | Pfu GenBank | MILDVDYITE EGKPVIRLFK KENGKFKIEH DRTFRPYIYA |
| | WP_011011325.1 R762Q with | LLRDDSKIEE VKKITGERHG KIVRIVDVEK VEKKFLGKPI |
| | DNA binding domain amino | TVWKLYLEHP QDVPTIREKV REHPAVVDIF EYDIPFAKRY |
| | acid sequence | LIDKGLIPME GEEELKILAF DIETLYHEGE EFGKGPIIMI |
| | | SYADENEAKV ITWKNIDLPY VEVVSSEREM IKRFLRIIRE |
| | | KDPDIIVTYN GDSFDFPYLA KRAEKLGIKL TIGRDGSEPK |
| | | MQRIGDMTAV EVKGRIHFDL YHVITRTINL PTYTLEAVYE |
| | | AIFGKPKEKV YADEIAKAWE SGENLERVAK YSMEDAKATY |
| | | ELGKEFLPME IQLSRLVGQP LWDVSRSSTG NLVEWFLLRK |
| | | AYERNEVAPN KPSEEEYQRR LRESYTGGFV KEPEKGLWEN |
| | | IVYLDFRALY PSIIITHNVS PDTLNLEGCK NYDIAPQVGH |
| | | KFCKDIPGFI PSLLGHLLEE RQKIKTKMKE TQDPIEKILL |
| | | DYRQKAIKLL ANSFYGYYGY AKARWYCKEC AESVTAWGRK |
| | | YIELVWKELE EKFGFKVLYI DTDGLYATIP GGESEEIKKK |
| | | ALEFVKYINS KLPGLLELEY EGFYKRGFFV TKKRYAVIDE |
| | | EGKVITRGLE IVRRDWSEIA KETQARVLET ILKHGDVEEA |
| | | VRIVKEVIQK LANYEIPPEK LAIYEQITRP LHEYKAIGPH |
| | | VAVAKKLAAK GVKIKPGMVI GYIVLRGDGP ISNRAILAEE |
| | | YDPKKHKYDA EYYIENQVLP AVLRILEGFG YRKEDLRYQK |
| | | TQQVGLTSWL NIKKSGTGGG GATVKFKYKG EEKEVDISKI |
| | | KKVWRVGKMI SFTYDEGGGK TGRGAVSEKD APKELLQMLE |
| | | KQKK |
| 13 | Pfu GenBank | MILDVDYITE EGKPVIRLFK KENGKFKIEH DRTFRPYIYA |
| | WP_011011325.1 A408S | LLRDDSKIEE VKKITGERHG KIVRIVDVEK VEKKFLGKPI |
| | R762X with DNA binding | TVWKLYLEHP QDVPTIREKV REHPAVVDIF EYDIPFAKRY |
| | domain amino acid sequence | LIDKGLIPME GEEELKILAF DIETLYHEGE EFGKGPIIMI |
| | | SYADENEAKV ITWKNIDLPY VEVVSSEREM IKRFLRIIRE |
| | | KDPDIIVTYN GDSFDFPYLA KRAEKLGIKL TIGRDGSEPK |
| | | MQRIGDMTAV EVKGRIHFDL YHVITRTINL PTYTLEAVYE |
| | | AIFGKPKEKV YADEIAKAWE SGENLERVAK YSMEDAKATY |
| | | ELGKEFLPME IQLSRLVGQP LWDVSRSSTG NLVEWFLLRK |
| | | AYERNEVAPN KPSEEEYQRR LRESYTGGFV KEPEKGLWEN |
| | | IVYLDFRSLY PSIIITHNVS PDTLNLEGCK NYDIAPQVGH |
| | | KFCKDIPGFI PSLLGHLLEE RQKIKTKMKE TQDPIEKILL |
| | | DYRQKAIKLL ANSFYGYYGY AKARWYCKEC AESVTAWGRK |
| | | YIELVWKELE EKFGFKVLYI DTDGLYATIP GGESEEIKKK |
| | | ALEFVKYINS KLPGLLELEY EGFYKRGFFV TKKRYAVIDE |
| | | EGKVITRGLE IVRRDWSEIA KETQARVLET ILKHGDVEEA |
| | | VRIVKEVIQK LANYEIPPEK LAIYEQITRP LHEYKAIGPH |
| | | VAVAKKLAAK GVKIKPGMVI GYIVLRGDGP ISNRAILAEE |
| | | YDPKKHKYDA EYYIENQVLP AVLRILEGFG YRKEDLRYQK |
| | | TXQVGLTSWL NIKKSGTGGG GATVKFKYKG EEKEVDISKI |
| | | KKVWRVGKMI SFTYDEGGGK TGRGAVSEKD APKELLQMLE |
| | | KQKK; |
| | | wherein X is selected from Q, N, H, S, T, Y, |
| | | C, M, W, A, I, L, F, V, P, and G; in some |
| | | embodiments, X is selected from Q and N. |
| 14 | Pfu GenBank | MILDVDYITE EGKPVIRLFK KENGKFKIEH DRTFRPYIYA |
| | WP_011011325.1 A408S | LLRDDSKIEE VKKITGERHG KIVRIVDVEK VEKKFLGKPI |
| | R762Q with DNA binding | TVWKLYLEHP QDVPTIREKV REHPAVVDIF EYDIPFAKRY |
| | domain amino acid sequence | LIDKGLIPME GEEELKILAF DIETLYHEGE EFGKGPIIMI |
| | | SYADENEAKV ITWKNIDLPY VEVVSSEREM IKRFLRIIRE |
| | | KDPDIIVTYN GDSFDFPYLA KRAEKLGIKL TIGRDGSEPK |
| | | MQRIGDMTAV EVKGRIHFDL YHVITRTINL PTYTLEAVYE |
| | | AIFGKPKEKV YADEIAKAWE SGENLERVAK YSMEDAKATY |
| | | ELGKEFLPME IQLSRLVGQP LWDVSRSSTG NLVEWFLLRK |
| | | AYERNEVAPN KPSEEEYQRR LRESYTGGFV KEPEKGLWEN |
| | | IVYLDFRSLY PSIIITHNVS PDTLNLEGCK NYDIAPQVGH |
| | | KFCKDIPGFI PSLLGHLLEE RQKIKTKMKE TQDPIEKILL |
| | | DYRQKAIKLL ANSFYGYYGY AKARWYCKEC AESVTAWGRK |
| | | YIELVWKELE EKFGFKVLYI DTDGLYATIP GGESEEIKKK |
| | | ALEFVKYINS KLPGLLELEY EGFYKRGFFV TKKRYAVIDE |
| | | EGKVITRGLE IVRRDWSEIA KETQARVLET ILKHGDVEEA |
| | | VRIVKEVIQK LANYEIPPEK LAIYEQITRP LHEYKAIGPH |
| | | VAVAKKLAAK GVKIKPGMVI GYIVLRGDGP ISNRAILAEE |
| | | YDPKKHKYDA EYYIENQVLP AVLRILEGFG YRKEDLRYQK |
| | | TQQVGLTSWL NIKKSGTGGG GATVKFKYKG EEKEVDISKI |
| | | KKVWRVGKMI SFTYDEGGGK TGRGAVSEKD APKELLQMLE |
| | | KQKK |
| 15 | Pyrococcus K762X catalytic | SYAGGFVKEP EKGLWENIVS LDFRALYPSI IITHNVSPDT |
| | domain amino acid sequence | LNREGCRNYD VAPEVGHKFC KDFPGFIPSL LKRLLDERQK |
| | | IKTKMKASQD PIEKIMLDYR QRAIKILANS YYGYYGYAKA |
| | | RWYCKECAES VTAWGREYIE FVWKELEEKF GFKVLYIDTD |
| | | GLYATIPGGK SEEIKKKALE FVDYINAKLP GLLELEYEGF |
| | | YKRGFFVTKK KYALIDEEGK IITRGLEIVR RDWSEIAKET |
| | | QARVLEAILK HGNVEEAVRI VKEVTQKLSK YEIPPEKLAI |
| | | YEQITRPLHE YKAIGPHVAV AKRLAAKGVK IKPGMVIGYI |
| | | VLRGDGPISN RAILAEEYDP RKHKYDAEYY IENQVLPAVL |
| | | RILEGFGYRK EDLRWQKTXQ TGL; |
| | | wherein X is selected from Q, N, H, S, T, Y, |
| | | C, M, W, A, I, L, F, V, P, and G; in some |
| | | embodiments, X is selected from Q and N. |
| 16 | Pyrococcus A408S K762X | SYAGGFVKEP EKGLWENIVS LDFRSLYPSI IITHNVSPDT |
| | catalytic domain amino acid | LNREGCRNYD VAPEVGHKFC KDFPGFIPSL LKRLLDERQK |
| | sequence | IKTKMKASQD PIEKIMLDYR QRAIKILANS YYGYYGYAKA |
| | | RWYCKECAES VTAWGREYIE FVWKELEEKF GFKVLYIDTD |
| | | GLYATIPGGK SEEIKKKALE FVDYINAKLP GLLELEYEGF |
| | | YKRGFFVTKK KYALIDEEGK IITRGLEIVR RDWSEIAKET |
| | | QARVLEAILK HGNVEEAVRI VKEVTQKLSK YEIPPEKLAI |
| | | YEQITRPLHE YKAIGPHVAV AKRLAAKGVK IKPGMVIGYI |
| | | VLRGDGPISN RAILAEEYDP RKHKYDAEYY IENQVLPAVL |
| | | RILEGFGYRK EDLRWQKTXQ TGL; |
| | | wherein X is selected from Q, N, H, S, T, Y, |
| | | C, M, W, A, I, L, F, V, P, and G; in some |
| | | embodiments, X is selected from Q and N. |
| 17 | Pyrococcus K762Q catalytic | SYAGGFVKEP EKGLWENIVS LDFRALYPSI IITHNVSPDT |
| | domain amino acid sequence | LNREGCRNYD VAPEVGHKFC KDFPGFIPSL LKRLLDERQK |
| | | IKTKMKASQD PIEKIMLDYR QRAIKILANS YYGYYGYAKA |
| | | RWYCKECAES VTAWGREYIE FVWKELEEKF GFKVLYIDTD |
| | | GLYATIPGGK SEEIKKKALE FVDYINAKLP GLLELEYEGF |
| | | YKRGFFVTKK KYALIDEEGK IITRGLEIVR RDWSEIAKET |
| | | QARVLEAILK HGNVEEAVRI VKEVTQKLSK YEIPPEKLAI |
| | | YEQITRPLHE YKAIGPHVAV AKRLAAKGVK IKPGMVIGYI |
| | | VLRGDGPISN RAILAEEYDP RKHKYDAEYY IENQVLPAVL |
| | | RILEGFGYRK EDLRWQKTQQ TGL |
| 18 | Pyrococcus 408S K762Q | SYAGGFVKEP EKGLWENIVS LDFRSLYPSI IITHNVSPDT |
| | catalytic domain amino acid | LNREGCRNYD VAPEVGHKFC KDFPGFIPSL LKRLLDERQK |
| | sequence | IKTKMKASQD PIEKIMLDYR QRAIKILANS YYGYYGYAKA |
| | | RWYCKECAES VTAWGREYIE FVWKELEEKF GFKVLYIDTD |
| | | GLYATIPGGK SEEIKKKALE FVDYINAKLP GLLELEYEGF |
| | | YKRGFFVTKK KYALIDEEGK IITRGLEIVR RDWSEIAKET |
| | | QARVLEAILK HGNVEEAVRI VKEVTQKLSK YEIPPEKLAI |
| | | YEQITRPLHE YKAIGPHVAV AKRLAAKGVK IKPGMVIGYI |
| | | VLRGDGPISN RAILAEEYDP RKHKYDAEYY IENQVLPAVL |
| | | RILEGFGYRK EDLRWQKTQQ TGL |
| 76 | Pyrococcus DNA polymerase | MILDADYITE EGKPVIRLFK KENGEFKIEH DRTFRPYIYA |
| | sequence including | LLKDDSKIEE VKKITAERHG KIVRIVDAEK VEKKFLGRPI |
| | exonuclease domain and | TVWRLYFEHP QDVPTIREKI REHSAVVDIF EYDIPFAKRY |
| | catalytic domain, K762X | LIDKGLIPME GDEELKLLAF DIETLYHEGE EFGKGPIIMI |
| | | SYADEEEAKV ITWKKIDLPY VEVVSSEREM IKRFLKIIRE |
| | | KDPDIIITYN GDSFDLPYLA KRAEKLGIKL TIGRDGSEPK |
| | | MQRIGDMTAV EVKGRIHFDL YHVIRRTINL PTYTLEAVYE |
| | | AIFGKPKEKV YADEIAKAWE TGEGLERVAK YSMEDAKATY |
| | | ELGKEFFPME AQLSRLVGQP LWDVSRSSTG NLVEWFLLRK |
| | | AYERNELAPN KPDEREYERR LRESYAGGFV KEPEKGLWEN |
| | | IVSLDFRALY PSIIITHNVS PDTLNREGCR NYDVAPEVGH |
| | | KFCKDFPGFI PSLLKRLLDE RQKIKTKMKA SQDPIEKIML |
| | | DYRQRAIKIL ANSYYGYYGY AKARWYCKEC AESVTAWGRE |
| | | YIEFVWKELE EKFGFKVLYI DTDGLYATIP GGKSEEIKKK |
| | | ALEFVDYINA KLPGLLELEY EGFYKRGFFV TKKKYALIDE |
| | | EGKIITRGLE IVRRDWSEIA KETQARVLEA ILKHGNVEEA |
| | | VRIVKEVTQK LSKYEIPPEK LAIYEQITRP LHEYKAIGPH |
| | | VAVAKRLAAK GVKIKPGMVI GYIVLRGDGP ISNRAILAEE |
| | | YDPRKHKYDA EYYIENQVLP AVLRILEGFG YRKEDLRWQK |
| | | TXQTGL; |
| | | wherein X is selected from Q, N, H, S, T, Y, |
| | | C, M, W, A, I, L, F, V, P, and G; in some |
| | | embodiments, X is selected from Q and N. |
| 77 | Pyrococcus DNA polymerase | MILDADYITE EGKPVIRLFK KENGEFKIEH DRTFRPYIYA |
| | sequence including | LLKDDSKIEE VKKITAERHG KIVRIVDAEK VEKKFLGRPI |
| | exonuclease domain and | TVWRLYFEHP QDVPTIREKI REHSAVVDIF EYDIPFAKRY |
| | catalytic domain, A408S | LIDKGLIPME GDEELKLLAF DIETLYHEGE EFGKGPIIMI |
| | K762X | SYADEEEAKV ITWKKIDLPY VEVVSSEREM IKRFLKIIRE |
| | | KDPDIIITYN GDSFDLPYLA KRAEKLGIKL TIGRDGSEPK |
| | | MQRIGDMTAV EVKGRIHFDL YHVIRRTINL PTYTLEAVYE |
| | | AIFGKPKEKV YADEIAKAWE TGEGLERVAK YSMEDAKATY |
| | | ELGKEFFPME AQLSRLVGQP LWDVSRSSTG NLVEWFLLRK |
| | | AYERNELAPN KPDEREYERR LRESYAGGFV KEPEKGLWEN |
| | | IVSLDFRSLY PSIIITHNVS PDTLNREGCR NYDVAPEVGH |
| | | KFCKDFPGFI PSLLKRLLDE RQKIKTKMKA SQDPIEKIML |
| | | DYRQRAIKIL ANSYYGYYGY AKARWYCKEC AESVTAWGRE |
| | | YIEFVWKELE EKFGFKVLYI DTDGLYATIP GGKSEEIKKK |
| | | ALEFVDYINA KLPGLLELEY EGFYKRGFFV TKKKYALIDE |
| | | EGKIITRGLE IVRRDWSEIA KETQARVLEA ILKHGNVEEA |
| | | VRIVKEVTQK LSKYEIPPEK LAIYEQITRP LHEYKAIGPH |
| | | VAVAKRLAAK GVKIKPGMVI GYIVLRGDGP ISNRAILAEE |
| | | YDPRKHKYDA EYYIENQVLP AVLRILEGFG YRKEDLRWQK |
| | | TXQTGL; |
| | | wherein X is selected from Q, N, H, S, T, Y, |
| | | C, M, W, A, I, L, F, V, P, and G; in some |
| | | embodiments, X is selected from Q and N. |
| 78 | Pyrococcus DNA polymerase | MILDADYITE EGKPVIRLFK KENGEFKIEH DRTFRPYIYA |
| | sequence including | LLKDDSKIEE VKKITAERHG KIVRIVDAEK VEKKFLGRPI |
| | exonuclease domain and | TVWRLYFEHP QDVPTIREKI REHSAVVDIF EYDIPFAKRY |
| | catalytic domain, K762Q | LIDKGLIPME GDEELKLLAF DIETLYHEGE EFGKGPIIMI |
| | | SYADEEEAKV ITWKKIDLPY VEVVSSEREM IKRFLKIIRE |
| | | KDPDIIITYN GDSFDLPYLA KRAEKLGIKL TIGRDGSEPK |
| | | MQRIGDMTAV EVKGRIHFDL YHVIRRTINL PTYTLEAVYE |
| | | AIFGKPKEKV YADEIAKAWE TGEGLERVAK YSMEDAKATY |
| | | ELGKEFFPME AQLSRLVGQP LWDVSRSSTG NLVEWFLLRK |
| | | AYERNELAPN KPDEREYERR LRESYAGGFV KEPEKGLWEN |
| | | IVSLDFRALY PSIIITHNVS PDTLNREGCR NYDVAPEVGH |
| | | KFCKDFPGFI PSLLKRLLDE RQKIKTKMKA SQDPIEKIML |
| | | DYRQRAIKIL ANSYYGYYGY AKARWYCKEC AESVTAWGRE |
| | | YIEFVWKELE EKFGFKVLYI DTDGLYATIP GGKSEEIKKK |
| | | ALEFVDYINA KLPGLLELEY EGFYKRGFFV TKKKYALIDE |
| | | EGKIITRGLE IVRRDWSEIA KETQARVLEA ILKHGNVEEA |
| | | VRIVKEVTQK LSKYEIPPEK LAIYEQITRP LHEYKAIGPH |
| | | VAVAKRLAAK GVKIKPGMVI GYIVLRGDGP ISNRAILAEE |
| | | YDPRKHKYDA EYYIENQVLP AVLRILEGFG YRKEDLRWQK |
| | | TQQTGL |
| 79 | Pyrococcus DNA polymerase | MILDADYITE EGKPVIRLFK KENGEFKIEH DRTFRPYIYA |
| | sequence including | LLKDDSKIEE VKKITAERHG KIVRIVDAEK VEKKFLGRPI |
| | exonuclease domain and | TVWRLYFEHP QDVPTIREKI REHSAVVDIF EYDIPFAKRY |
| | catalytic domain, A408S | LIDKGLIPME GDEELKLLAF DIETLYHEGE EFGKGPIIMI |
| | K762Q | SYADEEEAKV ITWKKIDLPY VEVVSSEREM IKRFLKIIRE |
| | | KDPDIIITYN GDSFDLPYLA KRAEKLGIKL TIGRDGSEPK |
| | | MQRIGDMTAV EVKGRIHFDL YHVIRRTINL PTYTLEAVYE |
| | | AIFGKPKEKV YADEIAKAWE TGEGLERVAK YSMEDAKATY |
| | | ELGKEFFPME AQLSRLVGQP LWDVSRSSTG NLVEWFLLRK |
| | | AYERNELAPN KPDEREYERR LRESYAGGFV KEPEKGLWEN |
| | | IVSLDFRSLY PSIIITHNVS PDTLNREGCR NYDVAPEVGH |
| | | KFCKDFPGFI PSLLKRLLDE RQKIKTKMKA SQDPIEKIML |
| | | DYRQRAIKIL ANSYYGYYGY AKARWYCKEC AESVTAWGRE |
| | | YIEFVWKELE EKFGFKVLYI DTDGLYATIP GGKSEEIKKK |
| | | ALEFVDYINA KLPGLLELEY EGFYKRGFFV TKKKYALIDE |
| | | EGKIITRGLE IVRRDWSEIA KETQARVLEA ILKHGNVEEA |
| | | VRIVKEVTQK LSKYEIPPEK LAIYEQITRP LHEYKAIGPH |
| | | VAVAKRLAAK GVKIKPGMVI GYIVLRGDGP ISNRAILAEE |
| | | YDPRKHKYDA EYYIENQVLP AVLRILEGFG YRKEDLRWQK |
| | | TQQTGL |
| 19 | Pyrococcus DNA polymerase | MILDADYITE EGKPVIRLFK KENGEFKIEH DRTFRPYIYA |
| | sequence including | LLKDDSKIEE VKKITAERHG KIVRIVDAEK VEKKFLGRPI |
| | exonuclease domain and DNA | TVWRLYFEHP QDVPTIREKI REHSAVVDIF EYDIPFAKRY |
| | binding domain, K762X | LIDKGLIPME GDEELKLLAF DIETLYHEGE EFGKGPIIMI |
| | | SYADEEEAKV ITWKKIDLPY VEVVSSEREM IKRFLKIIRE |
| | | KDPDIIITYN GDSFDLPYLA KRAEKLGIKL TIGRDGSEPK |
| | | MQRIGDMTAV EVKGRIHFDL YHVIRRTINL PTYTLEAVYE |
| | | AIFGKPKEKV YADEIAKAWE TGEGLERVAK YSMEDAKATY |
| | | ELGKEFFPME AQLSRLVGQP LWDVSRSSTG NLVEWFLLRK |
| | | AYERNELAPN KPDEREYERR LRESYAGGFV KEPEKGLWEN |
| | | IVSLDFRALY PSIIITHNVS PDTLNREGCR NYDVAPEVGH |
| | | KFCKDFPGFI PSLLKRLLDE RQKIKTKMKA SQDPIEKIML |
| | | DYRQRAIKIL ANSYYGYYGY AKARWYCKEC AESVTAWGRE |
| | | YIEFVWKELE EKFGFKVLYI DTDGLYATIP GGKSEEIKKK |
| | | ALEFVDYINA KLPGLLELEY EGFYKRGFFV TKKKYALIDE |
| | | EGKIITRGLE IVRRDWSEIA KETQARVLEA ILKHGNVEEA |
| | | VRIVKEVTQK LSKYEIPPEK LAIYEQITRP LHEYKAIGPH |
| | | VAVAKRLAAK GVKIKPGMVI GYIVLRGDGP ISNRAILAEE |
| | | YDPRKHKYDA EYYIENQVLP AVLRILEGFG YRKEDLRWQK |
| | | TXQTGLTSWL NIKKSGTGGG GATVKFKYKG EEKEVDISKI |
| | | KKVWRVGKMI SFTYDEGGGK TGRGAVSEKD APKELLQMLE |
| | | KQKK; |
| | | wherein X is selected from Q, N, H, S, T, Y, |
| | | C, M, W, A, I, L, F, V, P, and G; in some |
| | | embodiments, X is selected from Q and N. |
| 20 | Pyrococcus DNA polymerase | MILDADYITE EGKPVIRLFK KENGEFKIEH DRTFRPYIYA |
| | sequence including | LLKDDSKIEE VKKITAERHG KIVRIVDAEK VEKKFLGRPI |
| | exonuclease domain and DNA | TVWRLYFEHP QDVPTIREKI REHSAVVDIF EYDIPFAKRY |
| | binding domain, K762Q | LIDKGLIPME GDEELKLLAF DIETLYHEGE EFGKGPIIMI |
| | | SYADEEEAKV ITWKKIDLPY VEVVSSEREM IKRFLKIIRE |
| | | KDPDIIITYN GDSFDLPYLA KRAEKLGIKL TIGRDGSEPK |
| | | MQRIGDMTAV EVKGRIHFDL YHVIRRTINL PTYTLEAVYE |
| | | AIFGKPKEKV YADEIAKAWE TGEGLERVAK YSMEDAKATY |
| | | ELGKEFFPME AQLSRLVGQP LWDVSRSSTG NLVEWFLLRK |
| | | AYERNELAPN KPDEREYERR LRESYAGGFV KEPEKGLWEN |
| | | IVSLDFRALY PSIIITHNVS PDTLNREGCR NYDVAPEVGH |
| | | KFCKDFPGFI PSLLKRLLDE RQKIKTKMKA SQDPIEKIML |
| | | DYRQRAIKIL ANSYYGYYGY AKARWYCKEC AESVTAWGRE |
| | | YIEFVWKELE EKFGFKVLYI DTDGLYATIP GGKSEEIKKK |
| | | ALEFVDYINA KLPGLLELEY EGFYKRGFFV TKKKYALIDE |
| | | EGKIITRGLE IVRRDWSEIA KETQARVLEA ILKHGNVEEA |
| | | VRIVKEVTQK LSKYEIPPEK LAIYEQITRP LHEYKAIGPH |
| | | VAVAKRLAAK GVKIKPGMVI GYIVLRGDGP ISNRAILAEE |
| | | YDPRKHKYDA EYYIENQVLP AVLRILEGFG YRKEDLRWQK |
| | | TQQTGLTSWL NIKKSGTGGG GATVKFKYKG EEKEVDISKI |
| | | KKVWRVGKMI SFTYDEGGGK TGRGAVSEKD APKELLQMLE |
| | | KQKK |
| 21 | Pyrococcus DNA polymerase | MILDADYITE EGKPVIRLFK KENGEFKIEH DRTFRPYIYA |
| | sequence including | LLKDDSKIEE VKKITAERHG KIVRIVDAEK VEKKFLGRPI |
| | exonuclease domain and DNA | TVWRLYFEHP QDVPTIREKI REHSAVVDIF EYDIPFAKRY |
| | binding domain, A408S | LIDKGLIPME GDEELKLLAF DIETLYHEGE EFGKGPIIMI |
| | K762X | SYADEEEAKV ITWKKIDLPY VEVVSSEREM IKRFLKIIRE |
| | | KDPDIIITYN GDSFDLPYLA KRAEKLGIKL TIGRDGSEPK |
| | | MQRIGDMTAV EVKGRIHFDL YHVIRRTINL PTYTLEAVYE |
| | | AIFGKPKEKV YADEIAKAWE TGEGLERVAK YSMEDAKATY |
| | | ELGKEFFPME AQLSRLVGQP LWDVSRSSTG NLVEWFLLRK |
| | | AYERNELAPN KPDEREYERR LRESYAGGFV KEPEKGLWEN |
| | | IVSLDFRSLY PSIIITHNVS PDTLNREGCR NYDVAPEVGH |
| | | KFCKDFPGFI PSLLKRLLDE RQKIKTKMKA SQDPIEKIML |
| | | DYRQRAIKIL ANSYYGYYGY AKARWYCKEC AESVTAWGRE |
| | | YIEFVWKELE EKFGFKVLYI DTDGLYATIP GGKSEEIKKK |
| | | ALEFVDYINA KLPGLLELEY EGFYKRGFFV TKKKYALIDE |
| | | EGKIITRGLE IVRRDWSEIA KETQARVLEA ILKHGNVEEA |
| | | VRIVKEVTQK LSKYEIPPEK LAIYEQITRP LHEYKAIGPH |
| | | VAVAKRLAAK GVKIKPGMVI GYIVLRGDGP ISNRAILAEE |
| | | YDPRKHKYDA EYYIENQVLP AVLRILEGFG YRKEDLRWQK |
| | | TXQTGLTSWL NIKKSGTGGG GATVKFKYKG EEKEVDISKI |
| | | KKVWRVGKMI SFTYDEGGGK TGRGAVSEKD APKELLQMLE |
| | | KQKK; |
| | | wherein X is selected from Q, N, H, S, T, Y, |
| | | C, M, W, A, I, L, F, V, P, and G; in some |
| | | embodiments, X is selected from Q and N. |
| 22 | Pyrococcus DNA polymerase | MILDADYITE EGKPVIRLFK KENGEFKIEH DRTFRPYIYA |
| | sequence including | LLKDDSKIEE VKKITAERHG KIVRIVDAEK VEKKFLGRPI |
| | exonuclease domain and | TVWRLYFEHP QDVPTIREKI REHSAVVDIF EYDIPFAKRY |
| | sequence non-specific DNA | LIDKGLIPME GDEELKLLAF DIETLYHEGE EFGKGPIIMI |
| | binding domain, A408S | SYADEEEAKV ITWKKIDLPY VEVVSSEREM IKRFLKIIRE |
| | K762Q | KDPDIIITYN GDSFDLPYLA KRAEKLGIKL TIGRDGSEPK |
| | | MQRIGDMTAV EVKGRIHFDL YHVIRRTINL PTYTLEAVYE |
| | | AIFGKPKEKV YADEIAKAWE TGEGLERVAK YSMEDAKATY |
| | | ELGKEFFPME AQLSRLVGQP LWDVSRSSTG NLVEWFLLRK |
| | | AYERNELAPN KPDEREYERR LRESYAGGFV KEPEKGLWEN |
| | | IVSLDFRSLY PSIIITHNVS PDTLNREGCR NYDVAPEVGH |
| | | KFCKDFPGFI PSLLKRLLDE RQKIKTKMKA SQDPIEKIML |
| | | DYRQRAIKIL ANSYYGYYGY AKARWYCKEC AESVTAWGRE |
| | | YIEFVWKELE EKFGFKVLYI DTDGLYATIP GGKSEEIKKK |
| | | ALEFVDYINA KLPGLLELEY EGFYKRGFFV TKKKYALIDE |
| | | EGKIITRGLE IVRRDWSEIA KETQARVLEA ILKHGNVEEA |
| | | VRIVKEVTQK LSKYEIPPEK LAIYEQITRP LHEYKAIGPH |
| | | VAVAKRLAAK GVKIKPGMVI GYIVLRGDGP ISNRAILAEE |
| | | YDPRKHKYDA EYYIENQVLP AVLRILEGFG YRKEDLRWQK |
| | | TQQTGLTSWL NIKKSGTGGG GATVKFKYKG EEKEVDISKI |
| | | KKVWRVGKMI SFTYDEGGGK TGRGAVSEKD APKELLQMLE |
| | | KQKK |
| 23 | K762X variant of Deep Vent | MILDADYITE DGKPIIRIFK KENGEFKVEY DRNFRPYIYA |
| | DNA polymerase amino acid | LLKDDSQIDE VRKITAERHG KIVRIIDAEK VRKKFLGRPI |
| | sequence | EVWRLYFEHP QDVPAIRDKI REHSAVIDIF EYDIPFAKRY |
| | | LIDKGLIPME GDEELKLLAF DIETLYHEGE EFAKGPIIMI |
| | | SYADEEEAKV ITWKKIDLPY VEVVSSEREM IKRFLKVIRE |
| | | KDPDVIITYN GDSFDLPYLV KRAEKLGIKL PLGRDGSEPK |
| | | MQRLGDMTAV EIKGRIHFDL YHVIRRTINL PTYTLEAVYE |
| | | AIFGKPKEKV YAHEIAEAWE TGKGLERVAK YSMEDAKVTY |
| | | ELGREFFPME AQLSRLVGQP LWDVSRSSTG NLVEWYLLRK |
| | | AYERNELAPN KPDEREYERR LRESYAGGYV KEPEKGLWEG |
| | | LVSLDFRSLY PSIIITHNVS PDTLNREGCR EYDVAPEVGH |
| | | KFCKDFPGFI PSLLKRLLDE RQEIKRKMKA SKDPIEKKML |
| | | DYRQRAIKIL ANSYYGYYGY AKARWYCKEC AESVTAWGRE |
| | | YIEFVRKELE EKFGFKVLYI DTDGLYATIP GAKPEEIKKK |
| | | ALEFVDYINA KLPGLLELEY EGFYVRGFFV TKKKYALIDE |
| | | EGKIITRGLE IVRRDWSEIA KETQAKVLEA ILKHGNVEEA |
| | | VKIVKEVTEK LSKYEIPPEK LVIYEQITRP LHEYKAIGPH |
| | | VAVAKRLAAR GVKVRPGMVI GYIVLRGDGP ISKRAILAEE |
| | | FDLRKHKYDA EYYIENQVLP AVLRILEAFG YRKEDLRWQK |
| | | TXQTGLTAWL NIKKK; |
| | | wherein X is selected from Q, N, H, S, T, Y, |
| | | C, M, W, A, I, L, F, V, P, and G; in some |
| | | embodiments, X is selected from Q and N. |
| 24 | K762Q variant of Deep Vent | MILDADYITE DGKPIIRIFK KENGEFKVEY DRNFRPYIYA |
| | DNA polymerase amino acid | LLKDDSQIDE VRKITAERHG KIVRIIDAEK VRKKFLGRPI |
| | sequence | EVWRLYFEHP QDVPAIRDKI REHSAVIDIF EYDIPFAKRY |
| | | LIDKGLIPME GDEELKLLAF DIETLYHEGE EFAKGPIIMI |
| | | SYADEEEAKV ITWKKIDLPY VEVVSSEREM IKRFLKVIRE |
| | | KDPDVIITYN GDSFDLPYLV KRAEKLGIKL PLGRDGSEPK |
| | | MQRLGDMTAV EIKGRIHFDL YHVIRRTINL PTYTLEAVYE |
| | | AIFGKPKEKV YAHEIAEAWE TGKGLERVAK YSMEDAKVTY |
| | | ELGREFFPME AQLSRLVGQP LWDVSRSSTG NLVEWYLLRK |
| | | AYERNELAPN KPDEREYERR LRESYAGGYV KEPEKGLWEG |
| | | LVSLDFRSLY PSIIITHNVS PDTLNREGCR EYDVAPEVGH |
| | | KFCKDFPGFI PSLLKRLLDE RQEIKRKMKA SKDPIEKKML |
| | | DYRQRAIKIL ANSYYGYYGY AKARWYCKEC AESVTAWGRE |
| | | YIEFVRKELE EKFGFKVLYI DTDGLYATIP GAKPEEIKKK |
| | | ALEFVDYINA KLPGLLELEY EGFYVRGFFV TKKKYALIDE |
| | | EGKIITRGLE IVRRDWSEIA KETQAKVLEA ILKHGNVEEA |
| | | VKIVKEVTEK LSKYEIPPEK LVIYEQITRP LHEYKAIGPH |
| | | VAVAKRLAAR GVKVRPGMVI GYIVLRGDGP ISKRAILAEE |
| | | FDLRKHKYDA EYYIENQVLP AVLRILEAFG YRKEDLRWQK |
| | | TQQTGLTAWL NIKKK |
| 25 | K762X variant of Deep Vent | SYAGGYV KEPEKGLWEG LVSLDFRSLY PSIIITHNVS |
| | DNA polymerase catalytic | PDTLNREGCR EYDVAPEVGH KFCKDFPGFI PSLLKRLLDE |
| | domain amino acid sequence | RQEIKRKMKA SKDPIEKKML DYRQRAIKIL ANSYYGYYGY |
| | | AKARWYCKEC AESVTAWGRE YIEFVRKELE EKFGFKVLYI |
| | | DTDGLYATIP GAKPEEIKKK ALEFVDYINA KLPGLLELEY |
| | | EGFYVRGFFV TKKKYALIDE EGKIITRGLE IVRRDWSEIA |
| | | KETQAKVLEA ILKHGNVEEA VKIVKEVTEK LSKYEIPPEK |
| | | LVIYEQITRP LHEYKAIGPH VAVAKRLAAR GVKVRPGMVI |
| | | GYIVLRGDGP ISKRAILAEE FDLRKHKYDA EYYIENQVLP |
| | | AVLRILEAFG YRKEDLRWQK TXQTGL; |
| | | wherein X is selected from Q, N, H, S, T, Y, |
| | | C, M, W, A, I, L, F, V, P, and G; in some |
| | | embodiments, X is selected from Q and N. |
| 26 | K762Q variant of Deep Vent | SYAGGYV KEPEKGLWEG LVSLDFRSLY PSIIITHNVS |
| | DNA polymerase catalytic | PDTLNREGCR EYDVAPEVGH KFCKDFPGFI PSLLKRLLDE |
| | domain amino acid sequence | RQEIKRKMKA SKDPIEKKML DYRQRAIKIL ANSYYGYYGY |
| | | AKARWYCKEC AESVTAWGRE YIEFVRKELE EKFGFKVLYI |
| | | DTDGLYATIP GAKPEEIKKK ALEFVDYINA KLPGLLELEY |
| | | EGFYVRGFFV TKKKYALIDE EGKIITRGLE IVRRDWSEIA |
| | | KETQAKVLEA ILKHGNVEEA VKIVKEVTEK LSKYEIPPEK |
| | | LVIYEQITRP LHEYKAIGPH VAVAKRLAAR GVKVRPGMVI |
| | | GYIVLRGDGP ISKRAILAEE FDLRKHKYDA EYYIENQVLP |
| | | AVLRILEAFG YRKEDLRWQK TQQTGL |
| 27 | K762X variant of Deep Vent | MILDADYITE DGKPIIRIFK KENGEFKVEY DRNFRPYIYA |
| | DNA polymerase amino acid | LLKDDSQIDE VRKITAERHG KIVRIIDAEK VRKKFLGRPI |
| | sequence with DNA binding | EVWRLYFEHP QDVPAIRDKI REHSAVIDIF EYDIPFAKRY |
| | domain | LIDKGLIPME GDEELKLLAF DIETLYHEGE EFAKGPIIMI |
| | | SYADEEEAKV ITWKKIDLPY VEVVSSEREM IKRFLKVIRE |
| | | KDPDVIITYN GDSFDLPYLV KRAEKLGIKL PLGRDGSEPK |
| | | MQRLGDMTAV EIKGRIHFDL YHVIRRTINL PTYTLEAVYE |
| | | AIFGKPKEKV YAHEIAEAWE TGKGLERVAK YSMEDAKVTY |
| | | ELGREFFPME AQLSRLVGQP LWDVSRSSTG NLVEWYLLRK |
| | | AYERNELAPN KPDEREYERR LRESYAGGYV KEPEKGLWEG |
| | | LVSLDFRSLY PSIIITHNVS PDTLNREGCR EYDVAPEVGH |
| | | KFCKDFPGFI PSLLKRLLDE RQEIKRKMKA SKDPIEKKML |
| | | DYRQRAIKIL ANSYYGYYGY AKARWYCKEC AESVTAWGRE |
| | | YIEFVRKELE EKFGFKVLYI DTDGLYATIP GAKPEEIKKK |
| | | ALEFVDYINA KLPGLLELEY EGFYVRGFFV TKKKYALIDE |
| | | EGKIITRGLE IVRRDWSEIA KETQAKVLEA ILKHGNVEEA |
| | | VKIVKEVTEK LSKYEIPPEK LVIYEQITRP LHEYKAIGPH |
| | | VAVAKRLAAR GVKVRPGMVI GYIVLRGDGP ISKRAILAEE |
| | | FDLRKHKYDA EYYIENQVLP AVLRILEAFG YRKEDLRWQK |
| | | TXQTGLTAWL NIKKKGTGGG GATVKFKYKG EEKEVDISKI |
| | | KKVWRVGKMI SFTYDEGGGK TGRGAVSEKD APKELLQMLE |
| | | KQKK; |
| | | wherein X is selected from Q, N, H, S, T, Y, |
| | | C, M, W, A, I, L, F, V, P, and G; in some |
| | | embodiments, X is selected from Q and N. |
| 28 | K762Q variant of Deep Vent | MILDADYITE DGKPIIRIFK KENGEFKVEY DRNFRPYIYA |
| | DNA polymerase amino acid | LLKDDSQIDE VRKITAERHG KIVRIIDAEK VRKKFLGRPI |
| | sequence with DNA binding | EVWRLYFEHP QDVPAIRDKI REHSAVIDIF EYDIPFAKRY |
| | domain | LIDKGLIPME GDEELKLLAF DIETLYHEGE EFAKGPIIMI |
| | | SYADEEEAKV ITWKKIDLPY VEVVSSEREM IKRFLKVIRE |
| | | KDPDVIITYN GDSFDLPYLV KRAEKLGIKL PLGRDGSEPK |
| | | MQRLGDMTAV EIKGRIHFDL YHVIRRTINL PTYTLEAVYE |
| | | AIFGKPKEKV YAHEIAEAWE TGKGLERVAK YSMEDAKVTY |
| | | ELGREFFPME AQLSRLVGQP LWDVSRSSTG NLVEWYLLRK |
| | | AYERNELAPN KPDEREYERR LRESYAGGYV KEPEKGLWEG |
| | | LVSLDFRSLY PSIIITHNVS PDTLNREGCR EYDVAPEVGH |
| | | KFCKDFPGFI PSLLKRLLDE RQEIKRKMKA SKDPIEKKML |
| | | DYRQRAIKIL ANSYYGYYGY AKARWYCKEC AESVTAWGRE |
| | | YIEFVRKELE EKFGFKVLYI DTDGLYATIP GAKPEEIKKK |
| | | ALEFVDYINA KLPGLLELEY EGFYVRGFFV TKKKYALIDE |
| | | EGKIITRGLE IVRRDWSEIA KETQAKVLEA ILKHGNVEEA |
| | | VKIVKEVTEK LSKYEIPPEK LVIYEQITRP LHEYKAIGPH |
| | | VAVAKRLAAR GVKVRPGMVI GYIVLRGDGP ISKRAILAEE |
| | | FDLRKHKYDA EYYIENQVLP AVLRILEAFG YRKEDLRWQK |
| | | TQQTGLTAWL NIKKKGTGGG GATVKFKYKG EEKEVDISKI |
| | | KKVWRVGKMI SFTYDEGGGK TGRGAVSEKD APKELLQMLE |
| | | KQKK |
| 29 | K762X K775S variant of Deep | MILDADYITE DGKPIIRIFK KENGEFKVEY DRNFRPYIYA |
| | Vent DNA polymerase amino | LLKDDSQIDE VRKITAERHG KIVRIIDAEK VRKKFLGRPI |
| | acid sequence with sequence | EVWRLYFEHP QDVPAIRDKI REHSAVIDIF EYDIPFAKRY |
| | non-specific DNA binding | LIDKGLIPME GDEELKLLAF DIETLYHEGE EFAKGPIIMI |
| | domain | SYADEEEAKV ITWKKIDLPY VEVVSSEREM IKRFLKVIRE |
| | | KDPDVIITYN GDSFDLPYLV KRAEKLGIKL PLGRDGSEPK |
| | | MQRLGDMTAV EIKGRIHFDL YHVIRRTINL PTYTLEAVYE |
| | | AIFGKPKEKV YAHEIAEAWE TGKGLERVAK YSMEDAKVTY |
| | | ELGREFFPME AQLSRLVGQP LWDVSRSSTG NLVEWYLLRK |
| | | AYERNELAPN KPDEREYERR LRESYAGGYV KEPEKGLWEG |
| | | LVSLDFRSLY PSIIITHNVS PDTLNREGCR EYDVAPEVGH |
| | | KFCKDFPGFI PSLLKRLLDE RQEIKRKMKA SKDPIEKKML |
| | | DYRQRAIKIL ANSYYGYYGY AKARWYCKEC AESVTAWGRE |
| | | YIEFVRKELE EKFGFKVLYI DTDGLYATIP GAKPEEIKKK |
| | | ALEFVDYINA KLPGLLELEY EGFYVRGFFV TKKKYALIDE |
| | | EGKIITRGLE IVRRDWSEIA KETQAKVLEA ILKHGNVEEA |
| | | VKIVKEVTEK LSKYEIPPEK LVIYEQITRP LHEYKAIGPH |
| | | VAVAKRLAAR GVKVRPGMVI GYIVLRGDGP ISKRAILAEE |
| | | FDLRKHKYDA EYYIENQVLP AVLRILEAFG YRKEDLRWQK |
| | | TXQTGLTAWL NIKKSGTGGG GATVKFKYKG EEKEVDISKI |
| | | KKVWRVGKMI SFTYDEGGGK TGRGAVSEKD APKELLQMLE |
| | | KQKK; |
| | | wherein X is selected from Q, N, H, S, T, Y, |
| | | C, M, W, A, I, L, F, V, P, and G; in some |
| | | embodiments, X is selected from Q and N. |
| 30 | K762Q K775S variant of Deep | MILDADYITE DGKPIIRIFK KENGEFKVEY DRNFRPYIYA |
| | Vent DNA polymerase amino | LLKDDSQIDE VRKITAERHG KIVRIIDAEK VRKKFLGRPI |
| | acid sequence with sequence | EVWRLYFEHP QDVPAIRDKI REHSAVIDIF EYDIPFAKRY |
| | non-specific DNA binding | LIDKGLIPME GDEELKLLAF DIETLYHEGE EFAKGPIIMI |
| | domain | SYADEEEAKV ITWKKIDLPY VEVVSSEREM IKRFLKVIRE |
| | | KDPDVIITYN GDSFDLPYLV KRAEKLGIKL PLGRDGSEPK |
| | | MQRLGDMTAV EIKGRIHFDL YHVIRRTINL PTYTLEAVYE |
| | | AIFGKPKEKV YAHEIAEAWE TGKGLERVAK YSMEDAKVTY |
| | | ELGREFFPME AQLSRLVGQP LWDVSRSSTG NLVEWYLLRK |
| | | AYERNELAPN KPDEREYERR LRESYAGGYV KEPEKGLWEG |
| | | LVSLDFRSLY PSIIITHNVS PDTLNREGCR EYDVAPEVGH |
| | | KFCKDFPGFI PSLLKRLLDE RQEIKRKMKA SKDPIEKKML |
| | | DYRQRAIKIL ANSYYGYYGY AKARWYCKEC AESVTAWGRE |
| | | YIEFVRKELE EKFGFKVLYI DTDGLYATIP GAKPEEIKKK |
| | | ALEFVDYINA KLPGLLELEY EGFYVRGFFV TKKKYALIDE |
| | | EGKIITRGLE IVRRDWSEIA KETQAKVLEA ILKHGNVEEA |
| | | VKIVKEVTEK LSKYEIPPEK LVIYEQITRP LHEYKAIGPH |
| | | VAVAKRLAAR GVKVRPGMVI GYIVLRGDGP ISKRAILAEE |
| | | FDLRKHKYDA EYYIENQVLP AVLRILEAFG YRKEDLRWQK |
| | | TQQTGLTAWL NIKKSGTGGG GATVKFKYKG EEKEVDISKI |
| | | KKVWRVGKMI SFTYDEGGGK TGRGAVSEKD APKELLQMLE |
| | | KQKK |
| 31 | K764X variant of | MILDTDYITK DGKPIIRIFK KENGEFKIEL DPHFQPYIYA |
| | Thermococcus litoralis DNA | LLKDDSAIEE IKAIKGERHG KTVRVLDAVK VRKKFLGREV |
| | polymerase | EVWKLIFEHP QDVPAMRGKI REHPAVVDIY EYDIPFAKRY |
| | | LIDKGLIPME GDEELKLLAF DIETFYHEGD EFGKGEIIMI |
| | | SYADEEEARV ITWKNIDLPY VDVVSNEREM IKRFVQVVKE |
| | | KDPDVIITYN GDNFDLPYLI KRAEKLGVRL VLGRDKEHPE |
| | | PKIQRMGDSF AVEIKGRIHF DLFPVVRRTI NLPTYTLEAV |
| | | YEAVLGKTKS KLGAEEIAAI WETEESMKKL AQYSMEDARA |
| | | TYELGKEFFP MEAELAKLIG QSVWDVSRSS TGNLVEWYLL |
| | | RVAYARNELA PNKPDEEEYK RRLRTTYLGG YVKEPEKGLW |
| | | ENIIYLDFRS LYPSIIVTHN VSPDTLEKEG CKNYDVAPIV |
| | | GYRFCKDFPG FIPSILGDLI AMRQDIKKKM KSTIDPIEKK |
| | | MLDYRQRAIK LLANSYYGYM GYPKARWYSK ECAESVTAWG |
| | | RHYIEMTIRE IEEKFGFKVL YADTDGFYAT IPGEKPELIK |
| | | KKAKEFLNYI NSKLPGLLEL EYEGFYLRGF FVTKKRYAVI |
| | | DEEGRITTRG LEVVRRDWSE IAKETQAKVL EAILKEGSVE |
| | | KAVEVVRDVV EKIAKYRVPL EKLVIHEQIT RDLKDYKAIG |
| | | PHVAIAKRLA ARGIKVKPGT IISYIVLKGS GKISDRVILL |
| | | TEYDPRKHKY DPDYYIENQV LPAVLRILEA FGYRKEDLRY |
| | | QSSXQTGLDA WLKR; |
| | | wherein X is selected from Q, N, H, S, T, Y, |
| | | C, M, W, A, I, L, F, V, P, and G; in some |
| | | embodiments, X is selected from Q and N. |
| 32 | K764Q variant of | MILDTDYITK DGKPIIRIFK KENGEFKIEL DPHFQPYIYA |
| | Thermococcus litoralis DNA | LLKDDSAIEE IKAIKGERHG KTVRVLDAVK VRKKFLGREV |
| | polymerase | EVWKLIFEHP QDVPAMRGKI REHPAVVDIY EYDIPFAKRY |
| | | LIDKGLIPME GDEELKLLAF DIETFYHEGD EFGKGEIIMI |
| | | SYADEEEARV ITWKNIDLPY VDVVSNEREM IKRFVQVVKE |
| | | KDPDVIITYN GDNFDLPYLI KRAEKLGVRL VLGRDKEHPE |
| | | PKIQRMGDSF AVEIKGRIHF DLFPVVRRTI NLPTYTLEAV |
| | | YEAVLGKTKS KLGAEEIAAI WETEESMKKL AQYSMEDARA |
| | | TYELGKEFFP MEAELAKLIG QSVWDVSRSS TGNLVEWYLL |
| | | RVAYARNELA PNKPDEEEYK RRLRTTYLGG YVKEPEKGLW |
| | | ENIIYLDFRS LYPSIIVTHN VSPDTLEKEG CKNYDVAPIV |
| | | GYRFCKDFPG FIPSILGDLI AMRQDIKKKM KSTIDPIEKK |
| | | MLDYRQRAIK LLANSYYGYM GYPKARWYSK ECAESVTAWG |
| | | RHYIEMTIRE IEEKFGFKVL YADTDGFYAT IPGEKPELIK |
| | | KKAKEFLNYI NSKLPGLLEL EYEGFYLRGF FVTKKRYAVI |
| | | DEEGRITTRG LEVVRRDWSE IAKETQAKVL EAILKEGSVE |
| | | KAVEVVRDVV EKIAKYRVPL EKLVIHEQIT RDLKDYKAIG |
| | | PHVAIAKRLA ARGIKVKPGT IISYIVLKGS GKISDRVILL |
| | | TEYDPRKHKY DPDYYIENQV LPAVLRILEA FGYRKEDLRY |
| | | QSSQQTGLDA WLKR |
| 33 | K764X variant of | TYLGG YVKEPEKGLW ENIIYLDFRS LYPSIIVTHN |
| | Thermococcus litoralis DNA | VSPDTLEKEG CKNYDVAPIV GYRFCKDFPG FIPSILGDLI |
| | polymerase catalytic domain | AMRQDIKKKM KSTIDPIEKK MLDYRQRAIK LLANSYYGYM |
| | amino acid sequence | GYPKARWYSK ECAESVTAWG RHYIEMTIRE IEEKFGFKVL |
| | | YADTDGFYAT IPGEKPELIK KKAKEFLNYI NSKLPGLLEL |
| | | EYEGFYLRGF FVTKKRYAVI DEEGRITTRG LEVVRRDWSE |
| | | IAKETQAKVL EAILKEGSVE KAVEVVRDVV EKIAKYRVPL |
| | | EKLVIHEQIT RDLKDYKAIG PHVAIAKRLA ARGIKVKPGT |
| | | IISYIVLKGS GKISDRVILL TEYDPRKHKY DPDYYIENQV |
| | | LPAVLRILEA FGYRKEDLRY QSSXQTGL; |
| | | wherein X is selected from Q, N, H, S, T, Y, |
| | | C, M, W, A, I, L, F, V, P, and G; in some |
| | | embodiments, X is selected from Q and N. |
| 34 | K764Q variant of | TYLGG YVKEPEKGLW ENIIYLDFRS LYPSIIVTHN |
| | Thermococcus litoralis DNA | VSPDTLEKEG CKNYDVAPIV GYRFCKDFPG FIPSILGDLI |
| | polymerase catalytic domain | AMRQDIKKKM KSTIDPIEKK MLDYRQRAIK LLANSYYGYM |
| | amino acid sequence | GYPKARWYSK ECAESVTAWG RHYIEMTIRE IEEKFGFKVL |
| | | YADTDGFYAT IPGEKPELIK KKAKEFLNYI NSKLPGLLEL |
| | | EYEGFYLRGF FVTKKRYAVI DEEGRITTRG LEVVRRDWSE |
| | | IAKETQAKVL EAILKEGSVE KAVEVVRDVV EKIAKYRVPL |
| | | EKLVIHEQIT RDLKDYKAIG PHVAIAKRLA ARGIKVKPGT |
| | | IISYIVLKGS GKISDRVILL TEYDPRKHKY DPDYYIENQV |
| | | LPAVLRILEA FGYRKEDLRY QSSQQTGL |
| 35 | K764X variant of | MILDTDYITK DGKPIIRIFK KENGEFKIEL DPHFQPYIYA |
| | Thermococcus litoralis DNA | LLKDDSAIEE IKAIKGERHG KSVRVVDAVK VKKKFLGREV |
| | polymerase, sequence 2 (acc. | EVWKLIFEHP QDVPAMRDKI KEHPAVIDIY EYDIPFAKRY |
| | ADK47977.1) | LIDKGLIPME GDEELKLLAF DIETFYHEGD EFGKGEIIMI |
| | | SYADEEEARV ITWKNIDLPY VDVVSNEREM IKRFVQVVKE |
| | | KDPDVIITYN GDNFDLPYLI KRAEKLGVRL VLGRDKENPE |
| | | PKIQRMGDSF AVEIKGRIHF DLFPVVRRTI NLPTYTLEAV |
| | | YEAVLGKTKS KLGAEEIAAI WETEESMKKL AQYSMEDARA |
| | | TYELGKEFFP MEAELAKLIG QSVWDVSRSS TGNLVEWYLL |
| | | RVAYERNELA PNKPDEEEYK RRLRTTYLGG YVKEPEKGLW |
| | | ENIIYLDFRS LYPSIIVTHN VSPDTLEKEG CENYDIAPIV |
| | | SYRFCKDFPG FIPSILGDLI AMRQEIKKKM KATIDPVERK |
| | | MLDYRQRAVK LLANSYYGYM GYPKARWYSK ECAESVTAWG |
| | | RHYIEMTIKE IEEKFGFKVL YADTDGFYAT ISGEKPEIIK |
| | | KKAREFLNYI NSKLPGLLEL EYEGFYLRGF FVTKKRYAVI |
| | | DEEGRITTRG LEVVRRDWSE IAKETQAKVL EAILKDGSVE |
| | | KAVEIVRDVL EKIAKYRVPL EKLVIHEQIT RDLKDYKAIG |
| | | PHVAIAKRLA ARGIKVKPGT IISYIVLKGS GKISDRVILL |
| | | TEYDPEKHKY DPDYYIENQV LPAVLRILEA FGYRKEDLRY |
| | | QSSXQTGLDA WLKR; |
| | | wherein X is selected from Q, N, H, S, T, Y, |
| | | C, M, W, A, I, L, F, V, P, and G; in some |
| | | embodiments, X is selected from Q and N. |
| 36 | K764Q variant of | MILDTDYITK DGKPIIRIFK KENGEFKIEL DPHFQPYIYA |
| | Thermococcus litoralis DNA | LLKDDSAIEE IKAIKGERHG KSVRVVDAVK VKKKFLGREV |
| | polymerase, sequence 2 (acc. | EVWKLIFEHP QDVPAMRDKI KEHPAVIDIY EYDIPFAKRY |
| | ADK47977.1) | LIDKGLIPME GDEELKLLAF DIETFYHEGD EFGKGEIIMI |
| | | SYADEEEARV ITWKNIDLPY VDVVSNEREM IKRFVQVVKE |
| | | KDPDVIITYN GDNFDLPYLI KRAEKLGVRL VLGRDKENPE |
| | | PKIQRMGDSF AVEIKGRIHF DLFPVVRRTI NLPTYTLEAV |
| | | YEAVLGKTKS KLGAEEIAAI WETEESMKKL AQYSMEDARA |
| | | TYELGKEFFP MEAELAKLIG QSVWDVSRSS TGNLVEWYLL |
| | | RVAYERNELA PNKPDEEEYK RRLRTTYLGG YVKEPEKGLW |
| | | ENIIYLDFRS LYPSIIVTHN VSPDTLEKEG CENYDIAPIV |
| | | SYRFCKDFPG FIPSILGDLI AMRQEIKKKM KATIDPVERK |
| | | MLDYRQRAVK LLANSYYGYM GYPKARWYSK ECAESVTAWG |
| | | RHYIEMTIKE IEEKFGFKVL YADTDGFYAT ISGEKPEIIK |
| | | KKAREFLNYI NSKLPGLLEL EYEGFYLRGF FVTKKRYAVI |
| | | DEEGRITTRG LEVVRRDWSE IAKETQAKVL EAILKDGSVE |
| | | KAVEIVRDVL EKIAKYRVPL EKLVIHEQIT RDLKDYKAIG |
| | | PHVAIAKRLA ARGIKVKPGT IISYIVLKGS GKISDRVILL |
| | | TEYDPEKHKY DPDYYIENQV LPAVLRILEA FGYRKEDLRY |
| | | QSSQQTGLDA WLKR |
| 37 | K764X variant of | TYLGG YVKEPEKGLW ENIIYLDFRS LYPSIIVTHN |
| | Thermococcus litoralis DNA | VSPDTLEKEG CENYDIAPIV SYRFCKDFPG FIPSILGDLI |
| | polymerase, sequence 2 (acc. | AMRQEIKKKM KATIDPVERK MLDYRQRAVK LLANSYYGYM |
| | ADK47977.1), catalytic | GYPKARWYSK ECAESVTAWG RHYIEMTIKE IEEKFGFKVL |
| | domain amino acid sequence | YADTDGFYAT ISGEKPEIIK KKAREFLNYI NSKLPGLLEL |
| | | EYEGFYLRGF FVTKKRYAVI DEEGRITTRG LEVVRRDWSE |
| | | IAKETQAKVL EAILKDGSVE KAVEIVRDVL EKIAKYRVPL |
| | | EKLVIHEQIT RDLKDYKAIG PHVAIAKRLA ARGIKVKPGT |
| | | IISYIVLKGS GKISDRVILL TEYDPEKHKY DPDYYIENQV |
| | | LPAVLRILEA FGYRKEDLRY QSSXQTGL; |
| | | wherein X is selected from Q, N, H, S, T, Y, |
| | | C, M, W, A, I, L, F, V, P, and G; in some |
| | | embodiments, X is selected from Q and N. |
| 38 | K764Q variant of | TYLGG YVKEPEKGLW ENIIYLDFRS LYPSIIVTHN |
| | Thermococcus litoralis DNA | VSPDTLEKEG CENYDIAPIV SYRFCKDFPG FIPSILGDLI |
| | polymerase, sequence 2 (acc. | AMRQEIKKKM KATIDPVERK MLDYRQRAVK LLANSYYGYM |
| | ADK47977.1), catalytic | GYPKARWYSK ECAESVTAWG RHYIEMTIKE IEEKFGFKVL |
| | domain amino acid sequence | YADTDGFYAT ISGEKPEIIK KKAREFLNYI NSKLPGLLEL |
| | | EYEGFYLRGF FVTKKRYAVI DEEGRITTRG LEVVRRDWSE |
| | | IAKETQAKVL EAILKDGSVE KAVEIVRDVL EKIAKYRVPL |
| | | EKLVIHEQIT RDLKDYKAIG PHVAIAKRLA ARGIKVKPGT |
| | | IISYIVLKGS GKISDRVILL TEYDPEKHKY DPDYYIENQV |
| | | LPAVLRILEA FGYRKEDLRY QSSQQTGL |
| 39 | R761X variant of | MILDTDYITE DGKPVIRIFK KENGEFKIDY DRNFEPYIYA |
| | Thermococcus gorgonarius | LLKDDSAIED VKKITAERHG TTVRVVRAEK VKKKFLGRPI |
| | DNA polymerase | EVWKLYFTHP QDVPAIRDKI KEHPAVVDIY EYDIPFAKRY |
| | | LIDKGLIPME GDEELKMLAF DIETLYHEGE EFAEGPILMI |
| | | SYADEEGARV ITWKNIDLPY VDVVSTEKEM IKRFLKVVKE |
| | | KDPDVLITYN GDNFDFAYLK KRSEKLGVKF ILGREGSEPK |
| | | IQRMGDRFAV EVKGRIHFDL YPVIRRTINL PTYTLEAVYE |
| | | AIFGQPKEKV YAEEIAQAWE TGEGLERVAR YSMEDAKVTY |
| | | ELGKEFFPME AQLSRLVGQS LWDVSRSSTG NLVEWFLLRK |
| | | AYERNELAPN KPDERELARR RESYAGGYVK EPERGLWENI |
| | | VYLDFRSLYP SIIITHNVSP DTLNREGCEE YDVAPQVGHK |
| | | FCKDFPGFIP SLLGDLLEER QKVKKKMKAT IDPIEKKLLD |
| | | YRQRAIKILA NSFYGYYGYA KARWYCKECA ESVTAWGRQY |
| | | IETTIREIEE KFGFKVLYAD TDGFFATIPG ADAETVKKKA |
| | | KEFLDYINAK LPGLLELEYE GFYKRGFFVT KKKYAVIDEE |
| | | DKITTRGLEI VRRDWSEIAK ETQARVLEAI LKHGDVEEAV |
| | | RIVKEVTEKL SKYEVPPEKL VIYEQITRDL KDYKATGPHV |
| | | AVAKRLAARG IKIRPGTVIS YIVLKGSGRI GDRAIPFDEF |
| | | DPAKHKYDAE YYIENQVLPA VERILRAFGY RKEDLRYQKT |
| | | XQVGLGAWLK PKT; |
| | | wherein X is selected from Q, N, H, S, T, Y, |
| | | C, M, W, A, I, L, F, V, P, and G; in some |
| | | embodiments, X is selected from Q and N. |
| 40 | R761Q variant of | MILDTDYITE DGKPVIRIFK KENGEFKIDY DRNFEPYIYA |
| | Thermococcus gorgonarius | LLKDDSAIED VKKITAERHG TTVRVVRAEK VKKKFLGRPI |
| | DNA polymerase | EVWKLYFTHP QDVPAIRDKI KEHPAVVDIY EYDIPFAKRY |
| | | LIDKGLIPME GDEELKMLAF DIETLYHEGE EFAEGPILMI |
| | | SYADEEGARV ITWKNIDLPY VDVVSTEKEM IKRFLKVVKE |
| | | KDPDVLITYN GDNFDFAYLK KRSEKLGVKF ILGREGSEPK |
| | | IQRMGDRFAV EVKGRIHFDL YPVIRRTINL PTYTLEAVYE |
| | | AIFGQPKEKV YAEEIAQAWE TGEGLERVAR YSMEDAKVTY |
| | | ELGKEFFPME AQLSRLVGQS LWDVSRSSTG NLVEWFLLRK |
| | | AYERNELAPN KPDERELARR RESYAGGYVK EPERGLWENI |
| | | VYLDFRSLYP SIIITHNVSP DTLNREGCEE YDVAPQVGHK |
| | | FCKDFPGFIP SLLGDLLEER QKVKKKMKAT IDPIEKKLLD |
| | | YRQRAIKILA NSFYGYYGYA KARWYCKECA ESVTAWGRQY |
| | | IETTIREIEE KFGFKVLYAD TDGFFATIPG ADAETVKKKA |
| | | KEFLDYINAK LPGLLELEYE GFYKRGFFVT KKKYAVIDEE |
| | | DKITTRGLEI VRRDWSEIAK ETQARVLEAI LKHGDVEEAV |
| | | RIVKEVTEKL SKYEVPPEKL VIYEQITRDL KDYKATGPHV |
| | | AVAKRLAARG IKIRPGTVIS YIVLKGSGRI GDRAIPFDEF |
| | | DPAKHKYDAE YYIENQVLPA VERILRAFGY RKEDLRYQKT |
| | | QQVGLGAWLK PKT |
| 41 | R761X variant of | SYAGGYVK EPERGLWENI VYLDFRSLYP SIIITHNVSP |
| | Thermococcus gorgonarius | DTLNREGCEE YDVAPQVGHK FCKDFPGFIP SLLGDLLEER |
| | DNA polymerase, catalytic | QKVKKKMKAT IDPIEKKLLD YRQRAIKILA NSFYGYYGYA |
| | domain amino acid sequence | KARWYCKECA ESVTAWGRQY IETTIREIEE KFGFKVLYAD |
| | | TDGFFATIPG ADAETVKKKA KEFLDYINAK LPGLLELEYE |
| | | GFYKRGFFVT KKKYAVIDEE DKITTRGLEI VRRDWSEIAK |
| | | ETQARVLEAI LKHGDVEEAV RIVKEVTEKL SKYEVPPEKL |
| | | VIYEQITRDL KDYKATGPHV AVAKRLAARG IKIRPGTVIS |
| | | YIVLKGSGRI GDRAIPFDEF DPAKHKYDAE YYIENQVLPA |
| | | VERILRAFGY RKEDLRYQKT XQVGL; |
| | | wherein X is selected from Q, N, H, S, T, Y, |
| | | C, M, W, A, I, L, F, V, P, and G; in some |
| | | embodiments, X is selected from Q and N. |
| 42 | R761Q variant of | SYAGGYVK EPERGLWENI VYLDFRSLYP SIIITHNVSP |
| | Thermococcus gorgonarius | DTLNREGCEE YDVAPQVGHK FCKDFPGFIP SLLGDLLEER |
| | DNA polymerase, catalytic | QKVKKKMKAT IDPIEKKLLD YRQRAIKILA NSFYGYYGYA |
| | domain amino acid sequence | KARWYCKECA ESVTAWGRQY IETTIREIEE KFGFKVLYAD |
| | | TDGFFATIPG ADAETVKKKA KEFLDYINAK LPGLLELEYE |
| | | GFYKRGFFVT KKKYAVIDEE DKITTRGLEI VRRDWSEIAK |
| | | ETQARVLEAI LKHGDVEEAV RIVKEVTEKL SKYEVPPEKL |
| | | VIYEQITRDL KDYKATGPHV AVAKRLAARG IKIRPGTVIS |
| | | YIVLKGSGRI GDRAIPFDEF DPAKHKYDAE YYIENQVLPA |
| | | VERILRAFGY RKEDLRYQKT QQVGL |
| 43 | R761X variant of | MILDTDYITE DGKPVIRIFK KENGEFKIEY DRTFEPYFYA |
| | Thermococcus kodakarensis | LLKDDSAIEE VKKITAERHG TVVTVKRVEK VQKKFLGRPV |
| | DNA polymerase | EVWKLYFTHP QDVPAIRDKI REHPAVIDIY EYDIPFAKRY |
| | | LIDKGLVPME GDEELKMLAF DIETLYHEGE EFAEGPILMI |
| | | SYADEEGARV ITWKNVDLPY VDVVSTEREM IKRFLRVVKE |
| | | KDPDVLITYN GDNFDFAYLK KRCEKLGINF ALGRDGSEPK |
| | | IQRMGDRFAV EVKGRIHFDL YPVIRRTINL PTYTLEAVYE |
| | | AVFGQPKEKV YAEEITTAWE TGENLERVAR YSMEDAKVTY |
| | | ELGKEFLPME AQLSRLIGQS LWDVSRSSTG NLVEWFLLRK |
| | | AYERNELAPN KPDEKELARR RQSYEGGYVK EPERGLWENI |
| | | VYLDFRSLYP SIIITHNVSP DTLNREGCKE YDVAPQVGHR |
| | | FCKDFPGFIP SLLGDLLEER QKIKKKMKAT IDPIERKLLD |
| | | YRQRAIKILA NSYYGYYGYA RARWYCKECA ESVTAWGREY |
| | | ITMTIKEIEE KYGFKVIYSD TDGFFATIPG ADAETVKKKA |
| | | MEFLKYINAK LPGALELEYE GFYKRGFFVT KKKYAVIDEE |
| | | GKITTRGLEI VRRDWSEIAK ETQARVLEAL LKDGDVEKAV |
| | | RIVKEVTEKL SKYEVPPEKL VIHEQITRDL KDYKATGPHV |
| | | AVAKRLAARG VKIRPGTVIS YIVLKGSGRI GDRAIPFDEF |
| | | DPTKHKYDAE YYIENQVLPA VERILRAFGY RKEDLRYQKT |
| | | XQVGLSAWLK PKGT; |
| | | wherein X is selected from Q, N, H, S, T, Y, |
| | | C, M, W, A, I, L, F, V, P, and G; in some |
| | | embodiments, X is selected from Q and N. |
| 44 | R761Q variant of | MILDTDYITE DGKPVIRIFK KENGEFKIEY DRTFEPYFYA |
| | Thermococcus kodakarensis | LLKDDSAIEE VKKITAERHG TVVTVKRVEK VQKKFLGRPV |
| | DNA polymerase | EVWKLYFTHP QDVPAIRDKI REHPAVIDIY EYDIPFAKRY |
| | | LIDKGLVPME GDEELKMLAF DIETLYHEGE EFAEGPILMI |
| | | SYADEEGARV ITWKNVDLPY VDVVSTEREM IKRFLRVVKE |
| | | KDPDVLITYN GDNFDFAYLK KRCEKLGINF ALGRDGSEPK |
| | | IQRMGDRFAV EVKGRIHFDL YPVIRRTINL PTYTLEAVYE |
| | | AVFGQPKEKV YAEEITTAWE TGENLERVAR YSMEDAKVTY |
| | | ELGKEFLPME AQLSRLIGQS LWDVSRSSTG NLVEWFLLRK |
| | | AYERNELAPN KPDEKELARR RQSYEGGYVK EPERGLWENI |
| | | VYLDFRSLYP SIIITHNVSP DTLNREGCKE YDVAPQVGHR |
| | | FCKDFPGFIP SLLGDLLEER QKIKKKMKAT IDPIERKLLD |
| | | YRQRAIKILA NSYYGYYGYA RARWYCKECA ESVTAWGREY |
| | | ITMTIKEIEE KYGFKVIYSD TDGFFATIPG ADAETVKKKA |
| | | MEFLKYINAK LPGALELEYE GFYKRGFFVT KKKYAVIDEE |
| | | GKITTRGLEI VRRDWSEIAK ETQARVLEAL LKDGDVEKAV |
| | | RIVKEVTEKL SKYEVPPEKL VIHEQITRDL KDYKATGPHV |
| | | AVAKRLAARG VKIRPGTVIS YIVLKGSGRI GDRAIPFDEF |
| | | DPTKHKYDAE YYIENQVLPA VERILRAFGY RKEDLRYQKT |
| | | QQVGLSAWLK PKGT |
| 45 | R761X variant of | SYEGGYVK EPERGLWENI VYLDFRSLYP SIIITHNVSP |
| | Thermococcus kodakarensis | DTLNREGCKE YDVAPQVGHR FCKDFPGFIP SLLGDLLEER |
| | DNA polymerase, catalytic | QKIKKKMKAT IDPIERKLLD YRQRAIKILA NSYYGYYGYA |
| | domain amino acid sequence | RARWYCKECA ESVTAWGREY ITMTIKEIEE KYGFKVIYSD |
| | | TDGFFATIPG ADAETVKKKA MEFLKYINAK LPGALELEYE |
| | | GFYKRGFFVT KKKYAVIDEE GKITTRGLEI VRRDWSEIAK |
| | | ETQARVLEAL LKDGDVEKAV RIVKEVTEKL SKYEVPPEKL |
| | | VIHEQITRDL KDYKATGPHV AVAKRLAARG VKIRPGTVIS |
| | | YIVLKGSGRI GDRAIPFDEF DPTKHKYDAE YYIENQVLPA |
| | | VERILRAFGY RKEDLRYQKT XQVGL; |
| | | wherein X is selected from Q, N, H, S, T, Y, |
| | | C, M, W, A, I, L, F, V, P, and G; in some |
| | | embodiments, X is selected from Q and N. |
| 46 | R761Q variant of | SYEGGYVK EPERGLWENI VYLDFRSLYP SIIITHNVSP |
| | Thermococcus kodakarensis | DTLNREGCKE YDVAPQVGHR FCKDFPGFIP SLLGDLLEER |
| | DNA polymerase, catalytic | QKIKKKMKAT IDPIERKLLD YRQRAIKILA NSYYGYYGYA |
| | domain amino acid sequence | RARWYCKECA ESVTAWGREY ITMTIKEIEE KYGFKVIYSD |
| | | TDGFFATIPG ADAETVKKKA MEFLKYINAK LPGALELEYE |
| | | GFYKRGFFVT KKKYAVIDEE GKITTRGLEI VRRDWSEIAK |
| | | ETQARVLEAL LKDGDVEKAV RIVKEVTEKL SKYEVPPEKL |
| | | VIHEQITRDL KDYKATGPHV AVAKRLAARG VKIRPGTVIS |
| | | YIVLKGSGRI GDRAIPFDEF DPTKHKYDAE YYIENQVLPA |
| | | VERILRAFGY RKEDLRYQKT QQVGL |
| 47 | K761X variant of | GYAGGYVK EPERGLWDNI VYLDFRSLYP SIIITHNVSP |
| | Thermococcus species 9o N-7 | DTLNREGCKE YDVAPEVGHK FCKDFPGFIP SLLGDLLEER |
| | DNA polymerase, catalytic | QKIKRKMKAT VDPLEKKLLD YRQRAIKILA NSFYGYYGYA |
| | domain amino acid sequence | KARWYCKECA ESVTAWGREY IEMVIRELEE KFGFKVLYAD |
| | | TDGLHATIPG ADAETVKKKA KEFLKYINPK LPGLLELEYE |
| | | GFYVRGFFVT KKKYAVIDEE GKITTRGLEI VRRDWSEIAK |
| | | ETQARVLEAI LKHGDVEEAV RIVKEVTEKL SKYEVPPEKL |
| | | VIHEQITRDL RDYKATGPHV AVAKRLAARG VKIRPGTVIS |
| | | YIVLKGSGRI GDRAIPADEF DPTKHRYDAE YYIENQVLPA |
| | | VERILKAFGY RKEDLRYQKT XQVGL; |
| | | wherein X is selected from Q, N, H, S, T, Y, |
| | | C, M, W, A, I, L, F, V, P, and G; in some |
| | | embodiments, X is selected from Q and N. |
| 48 | K761Q variant of | GYAGGYVK EPERGLWDNI VYLDFRSLYP SIIITHNVSP |
| | Thermococcus species 9o N-7 | DTLNREGCKE YDVAPEVGHK FCKDFPGFIP SLLGDLLEER |
| | DNA polymerase, catalytic | QKIKRKMKAT VDPLEKKLLD YRQRAIKILA NSFYGYYGYA |
| | domain amino acid sequence | KARWYCKECA ESVTAWGREY IEMVIRELEE KFGFKVLYAD |
| | | TDGLHATIPG ADAETVKKKA KEFLKYINPK LPGLLELEYE |
| | | GFYVRGFFVT KKKYAVIDEE GKITTRGLEI VRRDWSEIAK |
| | | ETQARVLEAI LKHGDVEEAV RIVKEVTEKL SKYEVPPEKL |
| | | VIHEQITRDL RDYKATGPHV AVAKRLAARG VKIRPGTVIS |
| | | YIVLKGSGRI GDRAIPADEF DPTKHRYDAE YYIENQVLPA |
| | | VERILKAFGY RKEDLRYQKT QQVGL |
| 49 | K761X variant of | MILDTDYITE NGKPVIRVFK KENGEFKIEY DRTFEPYFYA |
| | Thermococcus species 9o N-7 | LLKDDSAIED VKKVTAKRHG TVVKVKRAEK VQKKFLGRPI |
| | DNA polymerase | EVWKLYFNHP QDVPAIRDRI RAHPAVVDIY EYDIPFAKRY |
| | | LIDKGLIPME GDEELTMLAF DIETLYHEGE EFGTGPILMI |
| | | SYADGSEARV ITWKKIDLPY VDVVSTEKEM IKRFLRVVRE |
| | | KDPDVLITYN GDNFDFAYLK KRCEELGIKF TLGRDGSEPK |
| | | IQRMGDRFAV EVKGRIHFDL YPVIRRTINL PTYTLEAVYE |
| | | AVFGKPKEKV YAEEIAQAWE SGEGLERVAR YSMEDAKVTY |
| | | ELGREFFPME AQLSRLIGQS LWDVSRSSTG NLVEWFLLRK |
| | | AYKRNELAPN KPDERELARR RGGYAGGYVK EPERGLWDNI |
| | | VYLDFRSLYP SIIITHNVSP DTLNREGCKE YDVAPEVGHK |
| | | FCKDFPGFIP SLLGDLLEER QKIKRKMKAT VDPLEKKLLD |
| | | YRQRAIKILA NSFYGYYGYA KARWYCKECA ESVTAWGREY |
| | | IEMVIRELEE KFGFKVLYAD TDGLHATIPG ADAETVKKKA |
| | | KEFLKYINPK LPGLLELEYE GFYVRGFFVT KKKYAVIDEE |
| | | GKITTRGLEI VRRDWSEIAK ETQARVLEAI LKHGDVEEAV |
| | | RIVKEVTEKL SKYEVPPEKL VIHEQITRDL RDYKATGPHV |
| | | AVAKRLAARG VKIRPGTVIS YIVLKGSGRI GDRAIPADEF |
| | | DPTKHRYDAE YYIENQVLPA VERILKAFGY RKEDLRYQKT |
| | | XQVGLGAWLK VKGKK; |
| | | wherein X is selected from Q, N, H, S, T, Y, |
| | | C, M, W, A, I, L, F, V, P, and G; in some |
| | | embodiments, X is selected from Q and N. |
| 50 | K761Q variant of | MILDTDYITE NGKPVIRVFK KENGEFKIEY DRTFEPYFYA |
| | Thermococcus species 9o N-7 | LLKDDSAIED VKKVTAKRHG TVVKVKRAEK VQKKFLGRPI |
| | DNA polymerase | EVWKLYFNHP QDVPAIRDRI RAHPAVVDIY EYDIPFAKRY |
| | | LIDKGLIPME GDEELTMLAF DIETLYHEGE EFGTGPILMI |
| | | SYADGSEARV ITWKKIDLPY VDVVSTEKEM IKRFLRVVRE |
| | | KDPDVLITYN GDNFDFAYLK KRCEELGIKF TLGRDGSEPK |
| | | IQRMGDRFAV EVKGRIHFDL YPVIRRTINL PTYTLEAVYE |
| | | AVFGKPKEKV YAEEIAQAWE SGEGLERVAR YSMEDAKVTY |
| | | ELGREFFPME AQLSRLIGQS LWDVSRSSTG NLVEWFLLRK |
| | | AYKRNELAPN KPDERELARR RGGYAGGYVK EPERGLWDNI |
| | | VYLDFRSLYP SIIITHNVSP DTLNREGCKE YDVAPEVGHK |
| | | FCKDFPGFIP SLLGDLLEER QKIKRKMKAT VDPLEKKLLD |
| | | YRQRAIKILA NSFYGYYGYA KARWYCKECA ESVTAWGREY |
| | | IEMVIRELEE KFGFKVLYAD TDGLHATIPG ADAETVKKKA |
| | | KEFLKYINPK LPGLLELEYE GFYVRGFFVT KKKYAVIDEE |
| | | GKITTRGLEI VRRDWSEIAK ETQARVLEAI LKHGDVEEAV |
| | | RIVKEVTEKL SKYEVPPEKL VIHEQITRDL RDYKATGPHV |
| | | AVAKRLAARG VKIRPGTVIS YIVLKGSGRI GDRAIPADEF |
| | | DPTKHRYDAE YYIENQVLPA VERILKAFGY RKEDLRYQKT |
| | | QQVGLGAWLK VKGKK |
| 51 | E775Q variant of Pyrobaculum | MRFWPLDATY SVVGGVPEVR VFGVDGEGRR VVLVDRRFRP |
| | calidifontis DNA polymerase | YFYAKCDKCD ASLAKSYLSR VAPVEAVEVV ERRFFGRPTI |
| | | FLKVVAKVPE DVRKLREAAL GAPGVVDVYE ADIRYYMRYM |
| | | IDKGVVPCAW NVVEAREAGK LGPLPLYEVV EWAGVEEGFP |
| | | PPLRVLAFDI EVYNERGSPD PLRDPVVMLA VKTSDGREEV |
| | | FEAEGRDDRR VIRGFVDFVK EFDPDVIVGY NSNGFDWPYL |
| | | SERAKALGVP LRVDRLGGVP QQSVYGHWSV VGRANVDLYN |
| | | IVDEFPEIKV KTLDRVAEYF GVMKRSERVL IPGHKVYEYW |
| | | NDPAKRPTLM RYVLDDVRST LGLAEKLLPF LIQLSSVSGL |
| | | PLDQVAAASV GNRVEWMLLR YAYRMGEVAP NREEREYEPY |
| | | KGAIVLEPKP GLYSDVLVLD FSSMYPNIMM KYNLSPDTYL |
| | | EPHEPDPPEG VVVAPEVGHR FRKAPTGFIP AVLKHLVELR |
| | | RAVREEAKKY PPDSPEYRLL DERQRALKVM ANAMYGYLGW |
| | | VGARWYKKEV AESVTAFARA ILLDVVEYAK RLGIEVIYGD |
| | | TDSLFVKKSG AVDRLVKYVE ERHGIEIKVD KDYERVLFTE |
| | | AKKRYAGLLR DGRIDIVGFE VVRGDWCELA KEVQLNVVEL |
| | | ILKSKSVGEA RERVVKYVRE VVERLKAYKF DLDDLIIWKT |
| | | LDKELDEYKA YGPHVHAALE LKRRGYKVGK GTTVGYVIVR |
| | | GPGKVSERAM PYIFVDDASK VDVDYYIEKQ VIPAALRIAE |
| | | VLGVKESDLK TGRVQKSLLD FLG |
| 52 | E778Q variant of Pyrobaculum | MKFKLWPLDA TYSVVGGVPE VRIFGISESG DRVVVVDRRF |
| | aerophilum DNA polymerase | RPYFYADCPA CDPESVRSQL GRVAPVEEVV AVERRYLGRP |
| | | RSFLKIVARV PEDVRKLREA AAALPGVSGV YEADIRFYMR |
| | | YMLDMGVVPC SWNTVDAEAT GEKLGNLPVY KVAEWGGVTE |
| | | GFPPPLRVLA FDIEVYNERG TPDPLRDPVI LLAVQASDGR |
| | | VEVFEASGRD DRSVLRSFID FVREFDPDVI VGYNSNQFDW |
| | | PYLAERARAL GIPLKVDRVG GAPQQSVYGH WSVTGRANVD |
| | | LYNIVDEFPE IKLKTLDRVA EYFGVMKREE RVLVPGHKIY |
| | | EYWRDQGKRP LLRQYVIDDV KSTYGLAEKL LPFLIQLSSV |
| | | SGLPLDQVAA ASVGNRVEWM LLRYAYRLGE VAPNREEREY |
| | | EPYKGAIVLE PRPGLYSDVL ALDFSSMYPN IMMKYNLSPD |
| | | TYLERGEPDP PGGVYVAPEV GHRFRREPPG FIPLVLRQLI |
| | | ELRKRVREEL KKYPPDSPEY RVLDERQRAL KIMANAMYGY |
| | | TGWVGARWYK KEVAESVTAF ARAILKDVIE YARKAGIVVI |
| | | YGDTDSLFVK KSGDVEKLVK YVEEKYGIDI KIDKDYSTVL |
| | | FTEAKKRYAG LLRDGRIDIV GFEVVRGDWS ELAKEVQLRV |
| | | IELILTSRDV SEARQKVVKY VRGVIDKLRN YEVDLDDLII |
| | | WKTLDKELDE YKAYPPHVHA AILLKKRGYK VGKGTTIGYV |
| | | VVKGGEKVSE RAVPYIFIDD IEKIDLDYYV ERQVIPAALR |
| | | IAEVIGIKEG DLKTGRSQRT LLDFF |
| 53 | Sso7d SNS-dsDBD amino acid | ATVKFKYKGE EKEVDISKIK KVWRVGKMIS FTYDEGGGKT |
| | sequence of Sulfolobus | GRGAVSEKDA PKELLQMLEK QKK |
| | solfataricus (see U.S. Pat. | |
| | No. 6,627,424) | |
| 54 | Sac7d SNS-dsDBD amino acid | VKVKFKYKGE EKEVDTSKIK KVWRVGKMVS FTYDDNGKTG |
| | sequence of Sulfolobus | RGAVSEKDAP KELLDMLARA EREKK |
| | acidocaldarius | |
| 55 | Pyrobaculum aerophilum | SKKQKLKFYD IKAKQAFETD QYEVIEKQTA RGPMMFAVAK |
| | Pae3192 amino acid sequence | SPYTGIKVYR LLGKKK |
| 56 | Pyrobaculum aerophilum | AKQKLKFYDI KAKQSFETDK YEVIEKETAR GPMLFAVATS |
| | Pae0384 amino acid sequence | PYTGIKVYRL LGKKK |
| 57 | Aeropyrum pernix Ape3192 | PKKEKIKFFD LVAKKYYETD NYEVEIKETK RGKFRFAKAK |
| | amino acid sequence | SPYTGKIFYR VLGKA |
| 58 | HMfA HMf family archaeal | GELPIAPIGR IIKNAGAERV SDDARIALAK VLEEMGEEIA |
| | histone amino acid sequence of | SEAVKLAKHA GRKTIKAED |
| | Methanothermus fervidus | |
| 59 | HMfB HMf family archaeal | ELPIAPIGRI IKDAGAERVS DDARITLAKI LEEMGRDIAS |
| | histone amino acid sequence of | EAIKLARHAG RKTIKAEDI |
| | Methanothermus fervidus | |
| 60 | HpyA1 HMf family archaeal | GELPIAPVDR LIRKAGAERV SEEAAKILAE YLEEYAIEVS |
| | histone amino acid sequence of | KKAVEFARHA GRKTVKAED |
| | Pyrococcus strain GB-3a | |
| 61 | HpyA2 HMf family archaeal | AELPIAPVDR LIRKAGAQRV SEQAAKLLAE HLEEKALEIA |
| | histone amino acid sequence of | RKAVDLAKHA GRKTVKAED |
| | Pyrococcus strain GB-3a | |
| 62 | Sso7d sequence non-specific | ATVKFKYKGE EKEVDISKIK KVWRVGKMIS FTYDEGGGKT |
| | DNA-binding domain amino | GRGAVSEKDA PKELLQMLEK QK |
| | acid sequence | |
| 63 | Pyrococcus 3′-5′ exonuclease | EELKLLAFDI ETLYHEGEEF GKGPIIMISY ADEEEAKVIT |
| | domain amino acid sequence | WKKIDLPYVE VVSSEREMIK RFLKIIREKD PDIIITYNGD |
| | | SFDLPYLAKR AEKLGIKLTI GRDGSEPKMQ RIGDMTAVEV |
| | | KGRIHFDLYH VIRRTINLPT YTLEAVYEAI FGKPKEKVYA |
| | | DEIAKAWETG EGLERVAKYS MEDAKATYEL GKEF |
| 64 | PCR Primer nucleotide | GAAGAGCCAAGGACAGGTAC |
| | sequence | |
| 65 | PCR Primer nucleotide | CCTCCAAATCAAGCCTCTAC |
| | sequence | |
| 66 | PCR Primer nucleotide | CAGTGCAGTGCTTGATAACAGG |
| | sequence | |
| 67 | PCR Primer nucleotide | GTAGTGCGCGTTTGATTTCC |
| | sequence | |
| 68 | PCR Primer nucleotide | CCTGCTCTGCCGCTTCACGC |
| | sequence | |
| 69 | PCR Primer nucleotide | CGAACGTCGCGCAGAGAAACAGG |
| | sequence | |
| 70 | PCR Primer nucleotide | CTGATGAGTTCGTGTCCGTACAACTGGCGTAATC |
| | sequence | |
| 71 | PCR Primer nucleotide | GTGCACCATGCAACATGAATAACAGTGGGTTATC |
| | sequence | |
| 72 | PCR Primer nucleotide | GGGCGTTTTCCGTAACACTG |
| | sequence | |
| 73 | PCR Primer nucleotide | TGACCACATACAATCGCCGT |
| | sequence | |
| 74 | PCR Primer nucleotide | CTCCACAGGGTGAGGTCTAAGTGATGACA |
| | sequence | |
| 75 | PCR Primer nucleotide | CAATCTCAGGGCAAGTTAAGGGAATAGTG |
| | sequence | |
| 80 | Pfu GenBank | MILDVDYITE EGKPVIRLFK KENGKFKIEH DRTFRHYIYA |
| | WP_011011325.1 P36H | LLRDDSKIEE VKKITGERHG KIVRIVDVEK VEKKFLGKPI |
| | R762X² amino acid sequence | TVWKLYLEHP QDVPTIREKV REHPAVVDIF EYDIPFAKRY |
| | | LIDKGLIPME GEEELKILAF DIETLYHEGE EFGKGPIIMI |
| | | SYADENEAKV ITWKNIDLPY VEVVSSEREM IKRFLRIIRE |
| | | KDPDIIVTYN GDSFDFPYLA KRAEKLGIKL TIGRDGSEPK |
| | | MQRIGDMTAV EVKGRIHFDL YHVITRTINL PTYTLEAVYE |
| | | AIFGKPKEKV YADEIAKAWE SGENLERVAK YSMEDAKATY |
| | | ELGKEFLPME IQLSRLVGQP LWDVSRSSTG NLVEWFLLRK |
| | | AYERNEVAPN KPSEEEYQRR LRESYTGGFV KEPEKGLWEN |
| | | IVYLDFRALY PSIIITHNVS PDTLNLEGCK NYDIAPQVGH |
| | | KFCKDIPGFI PSLLGHLLEE RQKIKTKMKE TQDPIEKILL |
| | | DYRQKAIKLL ANSFYGYYGY AKARWYCKEC AESVTAWGRK |
| | | YIELVWKELE EKFGFKVLYI DTDGLYATIP GGESEEIKKK |
| | | ALEFVKYINS KLPGLLELEY EGFYKRGFFV TKKRYAVIDE |
| | | EGKVITRGLE IVRRDWSEIA KETQARVLET ILKHGDVEEA |
| | | VRIVKEVIQK LANYEIPPEK LAIYEQITRP LHEYKAIGPH |
| | | VAVAKKLAAK GVKIKPGMVI GYIVLRGDGP ISNRAILAEE |
| | | YDPKKHKYDA EYYIENQVLP AVLRILEGFG YRKEDLRYQK |
| | | TX²QVGLTSWL NIKKS; |
| | | wherein X² is selected from Q, N, H, S, T, Y, |
| | | C, M, W, A, I, L, F, V, P, and G; in some |
| | | embodiments, X² is selected from Q and N. |
| 81 | Pfu GenBank | MILDVDYITE EGKPVIRLFK KENGKFKIEH DRTFRHYIYA |
| | WP_011011325.1 P36H | LLRDDSKIEE VKKITGERHG KIVRIVDVEK VEKKFLGKPI |
| | R762Q amino acid sequence | TVWKLYLEHP QDVPTIREKV REHPAVVDIF EYDIPFAKRY |
| | | LIDKGLIPME GEEELKILAF DIETLYHEGE EFGKGPIIMI |
| | | SYADENEAKV ITWKNIDLPY VEVVSSEREM IKRFLRIIRE |
| | | KDPDIIVTYN GDSFDFPYLA KRAEKLGIKL TIGRDGSEPK |
| | | MQRIGDMTAV EVKGRIHFDL YHVITRTINL PTYTLEAVYE |
| | | AIFGKPKEKV YADEIAKAWE SGENLERVAK YSMEDAKATY |
| | | ELGKEFLPME IQLSRLVGQP LWDVSRSSTG NLVEWFLLRK |
| | | AYERNEVAPN KPSEEEYQRR LRESYTGGFV KEPEKGLWEN |
| | | IVYLDFRALY PSIIITHNVS PDTLNLEGCK NYDIAPQVGH |
| | | KFCKDIPGFI PSLLGHLLEE RQKIKTKMKE TQDPIEKILL |
| | | DYRQKAIKLL ANSFYGYYGY AKARWYCKEC AESVTAWGRK |
| | | YIELVWKELE EKFGFKVLYI DTDGLYATIP GGESEEIKKK |
| | | ALEFVKYINS KLPGLLELEY EGFYKRGFFV TKKRYAVIDE |
| | | EGKVITRGLE IVRRDWSEIA KETQARVLET ILKHGDVEEA |
| | | VRIVKEVIQK LANYEIPPEK LAIYEQITRP LHEYKAIGPH |
| | | VAVAKKLAAK GVKIKPGMVI GYIVLRGDGP ISNRAILAEE |
| | | YDPKKHKYDA EYYIENQVLP AVLRILEGFG YRKEDLRYQK |
| | | TQQVGLTSWL NIKKS |
| 82 | Pfu GenBank | MILDVDYITE EGKPVIRLFK KENGKFKIEH DRTFRHYIYA |
| | WP_011011325.1 P36H | LLRDDSKIEE VKKITGERHG KIVRIVDVEK VEKKFLGKPI |
| | A408S R762X² amino acid | TVWKLYLEHP QDVPTIREKV REHPAVVDIF EYDIPFAKRY |
| | sequence | LIDKGLIPME GEEELKILAF DIETLYHEGE EFGKGPIIMI |
| | | SYADENEAKV ITWKNIDLPY VEVVSSEREM IKRFLRIIRE |
| | | KDPDIIVTYN GDSFDFPYLA KRAEKLGIKL TIGRDGSEPK |
| | | MQRIGDMTAV EVKGRIHFDL YHVITRTINL PTYTLEAVYE |
| | | AIFGKPKEKV YADEIAKAWE SGENLERVAK YSMEDAKATY |
| | | ELGKEFLPME IQLSRLVGQP LWDVSRSSTG NLVEWFLLRK |
| | | AYERNEVAPN KPSEEEYQRR LRESYTGGFV KEPEKGLWEN |
| | | IVYLDFRSLY PSIIITHNVS PDTLNLEGCK NYDIAPQVGH |
| | | KFCKDIPGFI PSLLGHLLEE RQKIKTKMKE TQDPIEKILL |
| | | DYRQKAIKLL ANSFYGYYGY AKARWYCKEC AESVTAWGRK |
| | | YIELVWKELE EKFGFKVLYI DTDGLYATIP GGESEEIKKK |
| | | ALEFVKYINS KLPGLLELEY EGFYKRGFFV TKKRYAVIDE |
| | | EGKVITRGLE IVRRDWSEIA KETQARVLET ILKHGDVEEA |
| | | VRIVKEVIQK LANYEIPPEK LAIYEQITRP LHEYKAIGPH |
| | | VAVAKKLAAK GVKIKPGMVI GYIVLRGDGP ISNRAILAEE |
| | | YDPKKHKYDA EYYIENQVLP AVLRILEGFG YRKEDLRYQK |
| | | TX²QVGLTSWL NIKKS; |
| | | wherein X² is selected from Q, N, H, S, T, Y, |
| | | C, M, W, A, I, L, F, V, P, and G; in some |
| | | embodiments, X² is selected from Q and N. |
| 83 | Pfu GenBank | MILDVDYITE EGKPVIRLFK KENGKFKIEH DRTFRHYIYA |
| | WP_011011325.1 P36H | LLRDDSKIEE VKKITGERHG KIVRIVDVEK VEKKFLGKPI |
| | A408S R762Q amino acid | TVWKLYLEHP QDVPTIREKV REHPAVVDIF EYDIPFAKRY |
| | sequence | LIDKGLIPME GEEELKILAF DIETLYHEGE EFGKGPIIMI |
| | | SYADENEAKV ITWKNIDLPY VEVVSSEREM IKRFLRIIRE |
| | | KDPDIIVTYN GDSFDFPYLA KRAEKLGIKL TIGRDGSEPK |
| | | MQRIGDMTAV EVKGRIHFDL YHVITRTINL PTYTLEAVYE |
| | | AIFGKPKEKV YADEIAKAWE SGENLERVAK YSMEDAKATY |
| | | ELGKEFLPME IQLSRLVGQP LWDVSRSSTG NLVEWFLLRK |
| | | AYERNEVAPN KPSEEEYQRR LRESYTGGFV KEPEKGLWEN |
| | | IVYLDFRSLY PSIIITHNVS PDTLNLEGCK NYDIAPQVGH |
| | | KFCKDIPGFI PSLLGHLLEE RQKIKTKMKE TQDPIEKILL |
| | | DYRQKAIKLL ANSFYGYYGY AKARWYCKEC AESVTAWGRK |
| | | YIELVWKELE EKFGFKVLYI DTDGLYATIP GGESEEIKKK |
| | | ALEFVKYINS KLPGLLELEY EGFYKRGFFV TKKRYAVIDE |
| | | EGKVITRGLE IVRRDWSEIA KETQARVLET ILKHGDVEEA |
| | | VRIVKEVIQK LANYEIPPEK LAIYEQITRP LHEYKAIGPH |
| | | VAVAKKLAAK GVKIKPGMVI GYIVLRGDGP ISNRAILAEE |
| | | YDPKKHKYDA EYYIENQVLP AVLRILEGFG YRKEDLRYQK |
| | | TQQVGLTSWL NIKKS |
| 84 | Pfu GenBank | MILDVDYITE EGKPVIRLFK KENGKFKIEH DRTFRHYIYA |
| | WP_011011325.1 P36H | LLRDDSKIEE VKKITGERHG KIVRIVDVEK VEKKFLGKPI |
| | R762X² with DNA binding | TVWKLYLEHP QDVPTIREKV REHPAVVDIF EYDIPFAKRY |
| | domain amino acid sequence | LIDKGLIPME GEEELKILAF DIETLYHEGE EFGKGPIIMI |
| | | SYADENEAKV ITWKNIDLPY VEVVSSEREM IKRFLRIIRE |
| | | KDPDIIVTYN GDSFDFPYLA KRAEKLGIKL TIGRDGSEPK |
| | | MQRIGDMTAV EVKGRIHFDL YHVITRTINL PTYTLEAVYE |
| | | AIFGKPKEKV YADEIAKAWE SGENLERVAK YSMEDAKATY |
| | | ELGKEFLPME IQLSRLVGQP LWDVSRSSTG NLVEWFLLRK |
| | | AYERNEVAPN KPSEEEYQRR LRESYTGGFV KEPEKGLWEN |
| | | IVYLDFRALY PSIIITHNVS PDTLNLEGCK NYDIAPQVGH |
| | | KFCKDIPGFI PSLLGHLLEE RQKIKTKMKE TQDPIEKILL |
| | | DYRQKAIKLL ANSFYGYYGY AKARWYCKEC AESVTAWGRK |
| | | YIELVWKELE EKFGFKVLYI DTDGLYATIP GGESEEIKKK |
| | | ALEFVKYINS KLPGLLELEY EGFYKRGFFV TKKRYAVIDE |
| | | EGKVITRGLE IVRRDWSEIA KETQARVLET ILKHGDVEEA |
| | | VRIVKEVIQK LANYEIPPEK LAIYEQITRP LHEYKAIGPH |
| | | VAVAKKLAAK GVKIKPGMVI GYIVLRGDGP ISNRAILAEE |
| | | YDPKKHKYDA EYYIENQVLP AVLRILEGFG YRKEDLRYQK |
| | | TX²QVGLTSWL NIKKSGTGGG GATVKFKYKG EEKEVDISKI |
| | | KKVWRVGKMI SFTYDEGGGK TGRGAVSEKD APKELLQMLE |
| | | KQKK; |
| | | wherein X² is selected from Q, N, H, S, T, Y, |
| | | C, M, W, A, I, L, F, V, P, and G; in some |
| | | embodiments, X² is selected from Q and N. |
| 85 | Pfu GenBank | MILDVDYITE EGKPVIRLFK KENGKFKIEH DRTFRHYIYA |
| | WP_011011325.1 P36H | LLRDDSKIEE VKKITGERHG KIVRIVDVEK VEKKFLGKPI |
| | R762Q with DNA binding | TVWKLYLEHP QDVPTIREKV REHPAVVDIF EYDIPFAKRY |
| | domain amino acid sequence | LIDKGLIPME GEEELKILAF DIETLYHEGE EFGKGPIIMI |
| | | SYADENEAKV ITWKNIDLPY VEVVSSEREM IKRFLRIIRE |
| | | KDPDIIVTYN GDSFDFPYLA KRAEKLGIKL TIGRDGSEPK |
| | | MQRIGDMTAV EVKGRIHFDL YHVITRTINL PTYTLEAVYE |
| | | AIFGKPKEKV YADEIAKAWE SGENLERVAK YSMEDAKATY |
| | | ELGKEFLPME IQLSRLVGQP LWDVSRSSTG NLVEWFLLRK |
| | | AYERNEVAPN KPSEEEYQRR LRESYTGGFV KEPEKGLWEN |
| | | IVYLDFRALY PSIIITHNVS PDTLNLEGCK NYDIAPQVGH |
| | | KFCKDIPGFI PSLLGHLLEE RQKIKTKMKE TQDPIEKILL |
| | | DYRQKAIKLL ANSFYGYYGY AKARWYCKEC AESVTAWGRK |
| | | YIELVWKELE EKFGFKVLYI DTDGLYATIP GGESEEIKKK |
| | | ALEFVKYINS KLPGLLELEY EGFYKRGFFV TKKRYAVIDE |
| | | EGKVITRGLE IVRRDWSEIA KETQARVLET ILKHGDVEEA |
| | | VRIVKEVIQK LANYEIPPEK LAIYEQITRP LHEYKAIGPH |
| | | VAVAKKLAAK GVKIKPGMVI GYIVLRGDGP ISNRAILAEE |
| | | YDPKKHKYDA EYYIENQVLP AVLRILEGFG YRKEDLRYQK |
| | | TQQVGLTSWL NIKKSGTGGG GATVKFKYKG EEKEVDISKI |
| | | KKVWRVGKMI SFTYDEGGGK TGRGAVSEKD APKELLQMLE |
| | | KQKK |
| 86 | Pfu GenBank | MILDVDYITE EGKPVIRLFK KENGKFKIEH DRTFRHYIYA |
| | WP_011011325.1 P36H | LLRDDSKIEE VKKITGERHG KIVRIVDVEK VEKKFLGKPI |
| | A408S R762X² with DNA | TVWKLYLEHP QDVPTIREKV REHPAVVDIF EYDIPFAKRY |
| | binding domain amino acid | LIDKGLIPME GEEELKILAF DIETLYHEGE EFGKGPIIMI |
| | sequence | SYADENEAKV ITWKNIDLPY VEVVSSEREM IKRFLRIIRE |
| | | KDPDIIVTYN GDSFDFPYLA KRAEKLGIKL TIGRDGSEPK |
| | | MQRIGDMTAV EVKGRIHFDL YHVITRTINL PTYTLEAVYE |
| | | AIFGKPKEKV YADEIAKAWE SGENLERVAK YSMEDAKATY |
| | | ELGKEFLPME IQLSRLVGQP LWDVSRSSTG NLVEWFLLRK |
| | | AYERNEVAPN KPSEEEYQRR LRESYTGGFV KEPEKGLWEN |
| | | IVYLDFRSLY PSIIITHNVS PDTLNLEGCK NYDIAPQVGH |
| | | KFCKDIPGFI PSLLGHLLEE RQKIKTKMKE TQDPIEKILL |
| | | DYRQKAIKLL ANSFYGYYGY AKARWYCKEC AESVTAWGRK |
| | | YIELVWKELE EKFGFKVLYI DTDGLYATIP GGESEEIKKK |
| | | ALEFVKYINS KLPGLLELEY EGFYKRGFFV TKKRYAVIDE |
| | | EGKVITRGLE IVRRDWSEIA KETQARVLET ILKHGDVEEA |
| | | VRIVKEVIQK LANYEIPPEK LAIYEQITRP LHEYKAIGPH |
| | | VAVAKKLAAK GVKIKPGMVI GYIVLRGDGP ISNRAILAEE |
| | | YDPKKHKYDA EYYIENQVLP AVLRILEGFG YRKEDLRYQK |
| | | TX²QVGLTSWL NIKKSGTGGG GATVKFKYKG EEKEVDISKI |
| | | KKVWRVGKMI SFTYDEGGGK TGRGAVSEKD APKELLQMLE |
| | | KQKK; |
| | | wherein X² is selected from Q, N, H, S, T, Y, |
| | | C, M, W, A, I, L, F, V, P, and G; in some |
| | | embodiments, X² is selected from Q and N. |
| 87 | Pfu GenBank | MILDVDYITE EGKPVIRLFK KENGKFKIEH DRTFRHYIYA |
| | WP_011011325.1 P36H | LLRDDSKIEE VKKITGERHG KIVRIVDVEK VEKKFLGKPI |
| | A408S R762Q with DNA | TVWKLYLEHP QDVPTIREKV REHPAVVDIF EYDIPFAKRY |
| | binding domain amino acid | LIDKGLIPME GEEELKILAF DIETLYHEGE EFGKGPIIMI |
| | sequence | SYADENEAKV ITWKNIDLPY VEVVSSEREM IKRFLRIIRE |
| | | KDPDIIVTYN GDSFDFPYLA KRAEKLGIKL TIGRDGSEPK |
| | | MQRIGDMTAV EVKGRIHFDL YHVITRTINL PTYTLEAVYE |
| | | AIFGKPKEKV YADEIAKAWE SGENLERVAK YSMEDAKATY |
| | | ELGKEFLPME IQLSRLVGQP LWDVSRSSTG NLVEWFLLRK |
| | | AYERNEVAPN KPSEEEYQRR LRESYTGGFV KEPEKGLWEN |
| | | IVYLDFRSLY PSIIITHNVS PDTLNLEGCK NYDIAPQVGH |
| | | KFCKDIPGFI PSLLGHLLEE RQKIKTKMKE TQDPIEKILL |
| | | DYRQKAIKLL ANSFYGYYGY AKARWYCKEC AESVTAWGRK |
| | | YIELVWKELE EKFGFKVLYI DTDGLYATIP GGESEEIKKK |
| | | ALEFVKYINS KLPGLLELEY EGFYKRGFFV TKKRYAVIDE |
| | | EGKVITRGLE IVRRDWSEIA KETQARVLET ILKHGDVEEA |
| | | VRIVKEVIQK LANYEIPPEK LAIYEQITRP LHEYKAIGPH |
| | | VAVAKKLAAK GVKIKPGMVI GYIVLRGDGP ISNRAILAEE |
| | | YDPKKHKYDA EYYIENQVLP AVLRILEGFG YRKEDLRYQK |
| | | TQQVGLTSWL NIKKSGTGGG GATVKFKYKG EEKEVDISKI |
| | | KKVWRVGKMI SFTYDEGGGK TGRGAVSEKD APKELLQMLE |
| | | KQKK |
| 88 | Pyrococcus DNA polymerase | MILDADYITE EGKPVIRLFK KENGEFKIEH DRTFRHYIYA |
| | sequence including | LLKDDSKIEE VKKITAERHG KIVRIVDAEK VEKKFLGRPI |
| | exonuclease domain and | TVWRLYFEHP QDVPTIREKI REHSAVVDIF EYDIPFAKRY |
| | catalytic domain, P36H | LIDKGLIPME GDEELKLLAF DIETLYHEGE EFGKGPIIMI |
| | K762X² | SYADEEEAKV ITWKKIDLPY VEVVSSEREM IKRFLKIIRE |
| | | KDPDIIITYN GDSFDLPYLA KRAEKLGIKL TIGRDGSEPK |
| | | MQRIGDMTAV EVKGRIHFDL YHVIRRTINL PTYTLEAVYE |
| | | AIFGKPKEKV YADEIAKAWE TGEGLERVAK YSMEDAKATY |
| | | ELGKEFFPME AQLSRLVGQP LWDVSRSSTG NLVEWFLLRK |
| | | AYERNELAPN KPDEREYERR LRESYAGGFV KEPEKGLWEN |
| | | IVSLDFRALY PSIIITHNVS PDTLNREGCR NYDVAPEVGH |
| | | KFCKDFPGFI PSLLKRLLDE RQKIKTKMKA SQDPIEKIML |
| | | DYRQRAIKIL ANSYYGYYGY AKARWYCKEC AESVTAWGRE |
| | | YIEFVWKELE EKFGFKVLYI DTDGLYATIP GGKSEEIKKK |
| | | ALEFVDYINA KLPGLLELEY EGFYKRGFFV TKKKYALIDE |
| | | EGKIITRGLE IVRRDWSEIA KETQARVLEA ILKHGNVEEA |
| | | VRIVKEVTQK LSKYEIPPEK LAIYEQITRP LHEYKAIGPH |
| | | VAVAKRLAAK GVKIKPGMVI GYIVLRGDGP ISNRAILAEE |
| | | YDPRKHKYDA EYYIENQVLP AVLRILEGFG YRKEDLRWQK |
| | | TX²QTGL; |
| | | wherein X² is selected from Q, N, H, S, T, Y, |
| | | C, M, W, A, I, L, F, V, P, and G; in some |
| | | embodiments, X² is selected from Q and N. |
| 89 | Pyrococcus DNA polymerase | MILDADYITE EGKPVIRLFK KENGEFKIEH DRTFRHYIYA |
| | sequence including | LLKDDSKIEE VKKITAERHG KIVRIVDAEK VEKKFLGRPI |
| | exonuclease domain and | TVWRLYFEHP QDVPTIREKI REHSAVVDIF EYDIPFAKRY |
| | catalytic domain, P36H A408S | LIDKGLIPME GDEELKLLAF DIETLYHEGE EFGKGPIIMI |
| | K762X² | SYADEEEAKV ITWKKIDLPY VEVVSSEREM IKRFLKIIRE |
| | | KDPDIIITYN GDSFDLPYLA KRAEKLGIKL TIGRDGSEPK |
| | | MQRIGDMTAV EVKGRIHFDL YHVIRRTINL PTYTLEAVYE |
| | | AIFGKPKEKV YADEIAKAWE TGEGLERVAK YSMEDAKATY |
| | | ELGKEFFPME AQLSRLVGQP LWDVSRSSTG NLVEWFLLRK |
| | | AYERNELAPN KPDEREYERR LRESYAGGFV KEPEKGLWEN |
| | | IVSLDFRSLY PSIIITHNVS PDTLNREGCR NYDVAPEVGH |
| | | KFCKDFPGFI PSLLKRLLDE RQKIKTKMKA SQDPIEKIML |
| | | DYRQRAIKIL ANSYYGYYGY AKARWYCKEC AESVTAWGRE |
| | | YIEFVWKELE EKFGFKVLYI DTDGLYATIP GGKSEEIKKK |
| | | ALEFVDYINA KLPGLLELEY EGFYKRGFFV TKKKYALIDE |
| | | EGKIITRGLE IVRRDWSEIA KETQARVLEA ILKHGNVEEA |
| | | VRIVKEVTQK LSKYEIPPEK LAIYEQITRP LHEYKAIGPH |
| | | VAVAKRLAAK GVKIKPGMVI GYIVLRGDGP ISNRAILAEE |
| | | YDPRKHKYDA EYYIENQVLP AVLRILEGFG YRKEDLRWQK |
| | | TX²QTGL; |
| | | wherein X² is selected from Q, N, H, S, T, Y, |
| | | C, M, W, A, I, L, F, V, P, and G; in some |
| | | embodiments, X² is selected from Q and N. |
| 90 | Pyrococcus DNA polymerase | MILDADYITE EGKPVIRLFK KENGEFKIEH DRTFRHYIYA |
| | sequence including | LLKDDSKIEE VKKITAERHG KIVRIVDAEK VEKKFLGRPI |
| | exonuclease domain and | TVWRLYFEHP QDVPTIREKI REHSAVVDIF EYDIPFAKRY |
| | catalytic domain, P36H | LIDKGLIPME GDEELKLLAF DIETLYHEGE EFGKGPIIMI |
| | K762Q | SYADEEEAKV ITWKKIDLPY VEVVSSEREM IKRFLKIIRE |
| | | KDPDIIITYN GDSFDLPYLA KRAEKLGIKL TIGRDGSEPK |
| | | MQRIGDMTAV EVKGRIHFDL YHVIRRTINL PTYTLEAVYE |
| | | AIFGKPKEKV YADEIAKAWE TGEGLERVAK YSMEDAKATY |
| | | ELGKEFFPME AQLSRLVGQP LWDVSRSSTG NLVEWFLLRK |
| | | AYERNELAPN KPDEREYERR LRESYAGGFV KEPEKGLWEN |
| | | IVSLDFRALY PSIIITHNVS PDTLNREGCR NYDVAPEVGH |
| | | KFCKDFPGFI PSLLKRLLDE RQKIKTKMKA SQDPIEKIML |
| | | DYRQRAIKIL ANSYYGYYGY AKARWYCKEC AESVTAWGRE |
| | | YIEFVWKELE EKFGFKVLYI DTDGLYATIP GGKSEEIKKK |
| | | ALEFVDYINA KLPGLLELEY EGFYKRGFFV TKKKYALIDE |
| | | EGKIITRGLE IVRRDWSEIA KETQARVLEA ILKHGNVEEA |
| | | VRIVKEVTQK LSKYEIPPEK LAIYEQITRP LHEYKAIGPH |
| | | VAVAKRLAAK GVKIKPGMVI GYIVLRGDGP ISNRAILAEE |
| | | YDPRKHKYDA EYYIENQVLP AVLRILEGFG YRKEDLRWQK |
| | | TQQTGL |
| 91 | Pyrococcus DNA polymerase | MILDADYITE EGKPVIRLFK KENGEFKIEH DRTFRHYIYA |
| | sequence including | LLKDDSKIEE VKKITAERHG KIVRIVDAEK VEKKFLGRPI |
| | exonuclease domain and | TVWRLYFEHP QDVPTIREKI REHSAVVDIF EYDIPFAKRY |
| | catalytic domain, P36H A408S | LIDKGLIPME GDEELKLLAF DIETLYHEGE EFGKGPIIMI |
| | K762Q | SYADEEEAKV ITWKKIDLPY VEVVSSEREM IKRFLKIIRE |
| | | KDPDIIITYN GDSFDLPYLA KRAEKLGIKL TIGRDGSEPK |
| | | MQRIGDMTAV EVKGRIHFDL YHVIRRTINL PTYTLEAVYE |
| | | AIFGKPKEKV YADEIAKAWE TGEGLERVAK YSMEDAKATY |
| | | ELGKEFFPME AQLSRLVGQP LWDVSRSSTG NLVEWFLLRK |
| | | AYERNELAPN KPDEREYERR LRESYAGGFV KEPEKGLWEN |
| | | IVSLDFRSLY PSIIITHNVS PDTLNREGCR NYDVAPEVGH |
| | | KFCKDFPGFI PSLLKRLLDE RQKIKTKMKA SQDPIEKIML |
| | | DYRQRAIKIL ANSYYGYYGY AKARWYCKEC AESVTAWGRE |
| | | YIEFVWKELE EKFGFKVLYI DTDGLYATIP GGKSEEIKKK |
| | | ALEFVDYINA KLPGLLELEY EGFYKRGFFV TKKKYALIDE |
| | | EGKIITRGLE IVRRDWSEIA KETQARVLEA ILKHGNVEEA |
| | | VRIVKEVTQK LSKYEIPPEK LAIYEQITRP LHEYKAIGPH |
| | | VAVAKRLAAK GVKIKPGMVI GYIVLRGDGP ISNRAILAEE |
| | | YDPRKHKYDA EYYIENQVLP AVLRILEGFG YRKEDLRWQK |
| | | TQQTGL |
| 92 | Pyrococcus DNA polymerase | MILDADYITE EGKPVIRLFK KENGEFKIEH DRTFRHYIYA |
| | sequence including | LLKDDSKIEE VKKITAERHG KIVRIVDAEK VEKKFLGRPI |
| | exonuclease domain and DNA | TVWRLYFEHP QDVPTIREKI REHSAVVDIF EYDIPFAKRY |
| | binding domain, P36H K762X² | LIDKGLIPME GDEELKLLAF DIETLYHEGE EFGKGPIIMI |
| | | SYADEEEAKV ITWKKIDLPY VEVVSSEREM IKRFLKIIRE |
| | | KDPDIIITYN GDSFDLPYLA KRAEKLGIKL TIGRDGSEPK |
| | | MQRIGDMTAV EVKGRIHFDL YHVIRRTINL PTYTLEAVYE |
| | | AIFGKPKEKV YADEIAKAWE TGEGLERVAK YSMEDAKATY |
| | | ELGKEFFPME AQLSRLVGQP LWDVSRSSTG NLVEWFLLRK |
| | | AYERNELAPN KPDEREYERR LRESYAGGFV KEPEKGLWEN |
| | | IVSLDFRALY PSIIITHNVS PDTLNREGCR NYDVAPEVGH |
| | | KFCKDFPGFI PSLLKRLLDE RQKIKTKMKA SQDPIEKIML |
| | | DYRQRAIKIL ANSYYGYYGY AKARWYCKEC AESVTAWGRE |
| | | YIEFVWKELE EKFGFKVLYI DTDGLYATIP GGKSEEIKKK |
| | | ALEFVDYINA KLPGLLELEY EGFYKRGFFV TKKKYALIDE |
| | | EGKIITRGLE IVRRDWSEIA KETQARVLEA ILKHGNVEEA |
| | | VRIVKEVTQK LSKYEIPPEK LAIYEQITRP LHEYKAIGPH |
| | | VAVAKRLAAK GVKIKPGMVI GYIVLRGDGP ISNRAILAEE |
| | | YDPRKHKYDA EYYIENQVLP AVLRILEGFG YRKEDLRWQK |
| | | TX²QTGLTSWL NIKKSGTGGG GATVKFKYKG EEKEVDISKI |
| | | KKVWRVGKMI SFTYDEGGGK TGRGAVSEKD APKELLQMLE |
| | | KQKK; |
| | | wherein X² is selected from Q, N, H, S, T, Y, |
| | | C, M, W, A, I, L, F, V, P, and G; in some |
| | | embodiments, X² is selected from Q and N. |
| 93 | Pyrococcus DNA polymerase | MILDADYITE EGKPVIRLFK KENGEFKIEH DRTFRHYIYA |
| | sequence including | LLKDDSKIEE VKKITAERHG KIVRIVDAEK VEKKFLGRPI |
| | exonuclease domain and DNA | TVWRLYFEHP QDVPTIREKI REHSAVVDIF EYDIPFAKRY |
| | binding domain, P36H K762Q | LIDKGLIPME GDEELKLLAF DIETLYHEGE EFGKGPIIMI |
| | | SYADEEEAKV ITWKKIDLPY VEVVSSEREM IKRFLKIIRE |
| | | KDPDIIITYN GDSFDLPYLA KRAEKLGIKL TIGRDGSEPK |
| | | MQRIGDMTAV EVKGRIHFDL YHVIRRTINL PTYTLEAVYE |
| | | AIFGKPKEKV YADEIAKAWE TGEGLERVAK YSMEDAKATY |
| | | ELGKEFFPME AQLSRLVGQP LWDVSRSSTG NLVEWFLLRK |
| | | AYERNELAPN KPDEREYERR LRESYAGGFV KEPEKGLWEN |
| | | IVSLDFRALY PSIIITHNVS PDTLNREGCR NYDVAPEVGH |
| | | KFCKDFPGFI PSLLKRLLDE RQKIKTKMKA SQDPIEKIML |
| | | DYRQRAIKIL ANSYYGYYGY AKARWYCKEC AESVTAWGRE |
| | | YIEFVWKELE EKFGFKVLYI DTDGLYATIP GGKSEEIKKK |
| | | ALEFVDYINA KLPGLLELEY EGFYKRGFFV TKKKYALIDE |
| | | EGKIITRGLE IVRRDWSEIA KETQARVLEA ILKHGNVEEA |
| | | VRIVKEVTQK LSKYEIPPEK LAIYEQITRP LHEYKAIGPH |
| | | VAVAKRLAAK GVKIKPGMVI GYIVLRGDGP ISNRAILAEE |
| | | YDPRKHKYDA EYYIENQVLP AVLRILEGFG YRKEDLRWQK |
| | | TQQTGLTSWL NIKKSGTGGG GATVKFKYKG EEKEVDISKI |
| | | KKVWRVGKMI SFTYDEGGGK TGRGAVSEKD APKELLQMLE |
| | | KQKK |
| 94 | Pyrococcus DNA polymerase | MILDADYITE EGKPVIRLFK KENGEFKIEH DRTFRHYIYA |
| | sequence including | LLKDDSKIEE VKKITAERHG KIVRIVDAEK VEKKFLGRPI |
| | exonuclease domain and DNA | TVWRLYFEHP QDVPTIREKI REHSAVVDIF EYDIPFAKRY |
| | binding domain, P36H A408S | LIDKGLIPME GDEELKLLAF DIETLYHEGE EFGKGPIIMI |
| | K762X² | SYADEEEAKV ITWKKIDLPY VEVVSSEREM IKRFLKIIRE |
| | | KDPDIIITYN GDSFDLPYLA KRAEKLGIKL TIGRDGSEPK |
| | | MQRIGDMTAV EVKGRIHFDL YHVIRRTINL PTYTLEAVYE |
| | | AIFGKPKEKV YADEIAKAWE TGEGLERVAK YSMEDAKATY |
| | | ELGKEFFPME AQLSRLVGQP LWDVSRSSTG NLVEWFLLRK |
| | | AYERNELAPN KPDEREYERR LRESYAGGFV KEPEKGLWEN |
| | | IVSLDFRSLY PSIIITHNVS PDTLNREGCR NYDVAPEVGH |
| | | KFCKDFPGFI PSLLKRLLDE RQKIKTKMKA SQDPIEKIML |
| | | DYRQRAIKIL ANSYYGYYGY AKARWYCKEC AESVTAWGRE |
| | | YIEFVWKELE EKFGFKVLYI DTDGLYATIP GGKSEEIKKK |
| | | ALEFVDYINA KLPGLLELEY EGFYKRGFFV TKKKYALIDE |
| | | EGKIITRGLE IVRRDWSEIA KETQARVLEA ILKHGNVEEA |
| | | VRIVKEVTQK LSKYEIPPEK LAIYEQITRP LHEYKAIGPH |
| | | VAVAKRLAAK GVKIKPGMVI GYIVLRGDGP ISNRAILAEE |
| | | YDPRKHKYDA EYYIENQVLP AVLRILEGFG YRKEDLRWQK |
| | | TX²QTGLTSWL NIKKSGTGGG GATVKFKYKG EEKEVDISKI |
| | | KKVWRVGKMI SFTYDEGGGK TGRGAVSEKD APKELLQMLE |
| | | KQKK; |
| | | wherein X² is selected from Q, N, H, S, T, Y, |
| | | C, M, W, A, I, L, F, V, P, and G; in some |
| | | embodiments, X² is selected from Q and N. |
| 95 | Pyrococcus DNA polymerase | MILDADYITE EGKPVIRLFK KENGEFKIEH DRTFRHYIYA |
| | sequence including | LLKDDSKIEE VKKITAERHG KIVRIVDAEK VEKKFLGRPI |
| | exonuclease domain and | TVWRLYFEHP QDVPTIREKI REHSAVVDIF EYDIPFAKRY |
| | sequence non-specific DNA | LIDKGLIPME GDEELKLLAF DIETLYHEGE EFGKGPIIMI |
| | binding domain, P36H A408S | SYADEEEAKV ITWKKIDLPY VEVVSSEREM IKRFLKIIRE |
| | K762Q | KDPDIIITYN GDSFDLPYLA KRAEKLGIKL TIGRDGSEPK |
| | | MQRIGDMTAV EVKGRIHFDL YHVIRRTINL PTYTLEAVYE |
| | | AIFGKPKEKV YADEIAKAWE TGEGLERVAK YSMEDAKATY |
| | | ELGKEFFPME AQLSRLVGQP LWDVSRSSTG NLVEWFLLRK |
| | | AYERNELAPN KPDEREYERR LRESYAGGFV KEPEKGLWEN |
| | | IVSLDFRSLY PSIIITHNVS PDTLNREGCR NYDVAPEVGH |
| | | KFCKDFPGFI PSLLKRLLDE RQKIKTKMKA SQDPIEKIML |
| | | DYRQRAIKIL ANSYYGYYGY AKARWYCKEC AESVTAWGRE |
| | | YIEFVWKELE EKFGFKVLYI DTDGLYATIP GGKSEEIKKK |
| | | ALEFVDYINA KLPGLLELEY EGFYKRGFFV TKKKYALIDE |
| | | EGKIITRGLE IVRRDWSEIA KETQARVLEA ILKHGNVEEA |
| | | VRIVKEVTQK LSKYEIPPEK LAIYEQITRP LHEYKAIGPH |
| | | VAVAKRLAAK GVKIKPGMVI GYIVLRGDGP ISNRAILAEE |
| | | YDPRKHKYDA EYYIENQVLP AVLRILEGFG YRKEDLRWQK |
| | | TQQTGLTSWL NIKKSGTGGG GATVKFKYKG EEKEVDISKI |
| | | KKVWRVGKMI SFTYDEGGGK TGRGAVSEKD APKELLQMLE |
| | | KQKK |
| 96 | P36H K762X² variant of Deep | MILDADYITE DGKPIIRIFK KENGEFKVEY DRNFRHYIYA |
| | Vent DNA polymerase amino | LLKDDSQIDE VRKITAERHG KIVRIIDAEK VRKKFLGRPI |
| | acid sequence | EVWRLYFEHP QDVPAIRDKI REHSAVIDIF EYDIPFAKRY |
| | | LIDKGLIPME GDEELKLLAF DIETLYHEGE EFAKGPIIMI |
| | | SYADEEEAKV ITWKKIDLPY VEVVSSEREM IKRFLKVIRE |
| | | KDPDVIITYN GDSFDLPYLV KRAEKLGIKL PLGRDGSEPK |
| | | MQRLGDMTAV EIKGRIHFDL YHVIRRTINL PTYTLEAVYE |
| | | AIFGKPKEKV YAHEIAEAWE TGKGLERVAK YSMEDAKVTY |
| | | ELGREFFPME AQLSRLVGQP LWDVSRSSTG NLVEWYLLRK |
| | | AYERNELAPN KPDEREYERR LRESYAGGYV KEPEKGLWEG |
| | | LVSLDFRSLY PSIIITHNVS PDTLNREGCR EYDVAPEVGH |
| | | KFCKDFPGFI PSLLKRLLDE RQEIKRKMKA SKDPIEKKML |
| | | DYRQRAIKIL ANSYYGYYGY AKARWYCKEC AESVTAWGRE |
| | | YIEFVRKELE EKFGFKVLYI DTDGLYATIP GAKPEEIKKK |
| | | ALEFVDYINA KLPGLLELEY EGFYVRGFFV TKKKYALIDE |
| | | EGKIITRGLE IVRRDWSEIA KETQAKVLEA ILKHGNVEEA |
| | | VKIVKEVTEK LSKYEIPPEK LVIYEQITRP LHEYKAIGPH |
| | | VAVAKRLAAR GVKVRPGMVI GYIVLRGDGP ISKRAILAEE |
| | | FDLRKHKYDA EYYIENQVLP AVLRILEAFG YRKEDLRWQK |
| | | TX²QTGLTAWL NIKKK; |
| | | wherein X² is selected from Q, N, H, S, T, Y, |
| | | C, M, W, A, I, L, F, V, P, and G; in some |
| | | embodiments, X² is selected from Q and N. |
| 97 | P36H K762Q variant of Deep | MILDADYITE DGKPIIRIFK KENGEFKVEY DRNFRHYIYA |
| | Vent DNA polymerase amino | LLKDDSQIDE VRKITAERHG KIVRIIDAEK VRKKFLGRPI |
| | acid sequence | EVWRLYFEHP QDVPAIRDKI REHSAVIDIF EYDIPFAKRY |
| | | LIDKGLIPME GDEELKLLAF DIETLYHEGE EFAKGPIIMI |
| | | SYADEEEAKV ITWKKIDLPY VEVVSSEREM IKRFLKVIRE |
| | | KDPDVIITYN GDSFDLPYLV KRAEKLGIKL PLGRDGSEPK |
| | | MQRLGDMTAV EIKGRIHFDL YHVIRRTINL PTYTLEAVYE |
| | | AIFGKPKEKV YAHEIAEAWE TGKGLERVAK YSMEDAKVTY |
| | | ELGREFFPME AQLSRLVGQP LWDVSRSSTG NLVEWYLLRK |
| | | AYERNELAPN KPDEREYERR LRESYAGGYV KEPEKGLWEG |
| | | LVSLDFRSLY PSIIITHNVS PDTLNREGCR EYDVAPEVGH |
| | | KFCKDFPGFI PSLLKRLLDE RQEIKRKMKA SKDPIEKKML |
| | | DYRQRAIKIL ANSYYGYYGY AKARWYCKEC AESVTAWGRE |
| | | YIEFVRKELE EKFGFKVLYI DTDGLYATIP GAKPEEIKKK |
| | | ALEFVDYINA KLPGLLELEY EGFYVRGFFV TKKKYALIDE |
| | | EGKIITRGLE IVRRDWSEIA KETQAKVLEA ILKHGNVEEA |
| | | VKIVKEVTEK LSKYEIPPEK LVIYEQITRP LHEYKAIGPH |
| | | VAVAKRLAAR GVKVRPGMVI GYIVLRGDGP ISKRAILAEE |
| | | FDLRKHKYDA EYYIENQVLP AVLRILEAFG YRKEDLRWQK |
| | | TQQTGLTAWL NIKKK |
| 98 | P36H K762X² variant of Deep | MILDADYITE DGKPIIRIFK KENGEFKVEY DRNFRHYIYA |
| | Vent DNA polymerase amino | LLKDDSQIDE VRKITAERHG KIVRIIDAEK VRKKFLGRPI |
| | acid sequence with DNA | EVWRLYFEHP QDVPAIRDKI REHSAVIDIF EYDIPFAKRY |
| | binding domain | LIDKGLIPME GDEELKLLAF DIETLYHEGE EFAKGPIIMI |
| | | SYADEEEAKV ITWKKIDLPY VEVVSSEREM IKRFLKVIRE |
| | | KDPDVIITYN GDSFDLPYLV KRAEKLGIKL PLGRDGSEPK |
| | | MQRLGDMTAV EIKGRIHFDL YHVIRRTINL PTYTLEAVYE |
| | | AIFGKPKEKV YAHEIAEAWE TGKGLERVAK YSMEDAKVTY |
| | | ELGREFFPME AQLSRLVGQP LWDVSRSSTG NLVEWYLLRK |
| | | AYERNELAPN KPDEREYERR LRESYAGGYV KEPEKGLWEG |
| | | LVSLDFRSLY PSIIITHNVS PDTLNREGCR EYDVAPEVGH |
| | | KFCKDFPGFI PSLLKRLLDE RQEIKRKMKA SKDPIEKKML |
| | | DYRQRAIKIL ANSYYGYYGY AKARWYCKEC AESVTAWGRE |
| | | YIEFVRKELE EKFGFKVLYI DTDGLYATIP GAKPEEIKKK |
| | | ALEFVDYINA KLPGLLELEY EGFYVRGFFV TKKKYALIDE |
| | | EGKIITRGLE IVRRDWSEIA KETQAKVLEA ILKHGNVEEA |
| | | VKIVKEVTEK LSKYEIPPEK LVIYEQITRP LHEYKAIGPH |
| | | VAVAKRLAAR GVKVRPGMVI GYIVLRGDGP ISKRAILAEE |
| | | FDLRKHKYDA EYYIENQVLP AVLRILEAFG YRKEDLRWQK |
| | | TX²QTGLTAWL NIKKKGTGGG GATVKFKYKG EEKEVDISKI |
| | | KKVWRVGKMI SFTYDEGGGK TGRGAVSEKD APKELLQMLE |
| | | KQKK; |
| | | wherein X² is selected from Q, N, H, S, T, Y, |
| | | C, M, W, A, I, L, F, V, P, and G; in some |
| | | embodiments, X² is selected from Q and N. |
| 99 | P36H K762Q variant of Deep | MILDADYITE DGKPIIRIFK KENGEFKVEY DRNFRHYIYA |
| | Vent DNA polymerase amino | LLKDDSQIDE VRKITAERHG KIVRIIDAEK VRKKFLGRPI |
| | acid sequence with DNA | EVWRLYFEHP QDVPAIRDKI REHSAVIDIF EYDIPFAKRY |
| | binding domain | LIDKGLIPME GDEELKLLAF DIETLYHEGE EFAKGPIIMI |
| | | SYADEEEAKV ITWKKIDLPY VEVVSSEREM IKRFLKVIRE |
| | | KDPDVIITYN GDSFDLPYLV KRAEKLGIKL PLGRDGSEPK |
| | | MQRLGDMTAV EIKGRIHFDL YHVIRRTINL PTYTLEAVYE |
| | | AIFGKPKEKV YAHEIAEAWE TGKGLERVAK YSMEDAKVTY |
| | | ELGREFFPME AQLSRLVGQP LWDVSRSSTG NLVEWYLLRK |
| | | AYERNELAPN KPDEREYERR LRESYAGGYV KEPEKGLWEG |
| | | LVSLDFRSLY PSIIITHNVS PDTLNREGCR EYDVAPEVGH |
| | | KFCKDFPGFI PSLLKRLLDE RQEIKRKMKA SKDPIEKKML |
| | | DYRQRAIKIL ANSYYGYYGY AKARWYCKEC AESVTAWGRE |
| | | YIEFVRKELE EKFGFKVLYI DTDGLYATIP GAKPEEIKKK |
| | | ALEFVDYINA KLPGLLELEY EGFYVRGFFV TKKKYALIDE |
| | | EGKIITRGLE IVRRDWSEIA KETQAKVLEA ILKHGNVEEA |
| | | VKIVKEVTEK LSKYEIPPEK LVIYEQITRP LHEYKAIGPH |
| | | VAVAKRLAAR GVKVRPGMVI GYIVLRGDGP ISKRAILAEE |
| | | FDLRKHKYDA EYYIENQVLP AVLRILEAFG YRKEDLRWQK |
| | | TQQTGLTAWL NIKKKGTGGG GATVKFKYKG EEKEVDISKI |
| | | KKVWRVGKMI SFTYDEGGGK TGRGAVSEKD APKELLQMLE |
| | | KQKK |
| 100 | P36H K762X² K775S variant | MILDADYITE DGKPIIRIFK KENGEFKVEY DRNFRHYIYA |
| | of Deep Vent DNA | LLKDDSQIDE VRKITAERHG KIVRIIDAEK VRKKFLGRPI |
| | polymerase amino acid | EVWRLYFEHP QDVPAIRDKI REHSAVIDIF EYDIPFAKRY |
| | sequence with sequence non- | LIDKGLIPME GDEELKLLAF DIETLYHEGE EFAKGPIIMI |
| | specific DNA binding domain | SYADEEEAKV ITWKKIDLPY VEVVSSEREM IKRFLKVIRE |
| | | KDPDVIITYN GDSFDLPYLV KRAEKLGIKL PLGRDGSEPK |
| | | MQRLGDMTAV EIKGRIHFDL YHVIRRTINL PTYTLEAVYE |
| | | AIFGKPKEKV YAHEIAEAWE TGKGLERVAK YSMEDAKVTY |
| | | ELGREFFPME AQLSRLVGQP LWDVSRSSTG NLVEWYLLRK |
| | | AYERNELAPN KPDEREYERR LRESYAGGYV KEPEKGLWEG |
| | | LVSLDFRSLY PSIIITHNVS PDTLNREGCR EYDVAPEVGH |
| | | KFCKDFPGFI PSLLKRLLDE RQEIKRKMKA SKDPIEKKML |
| | | DYRQRAIKIL ANSYYGYYGY AKARWYCKEC AESVTAWGRE |
| | | YIEFVRKELE EKFGFKVLYI DTDGLYATIP GAKPEEIKKK |
| | | ALEFVDYINA KLPGLLELEY EGFYVRGFFV TKKKYALIDE |
| | | EGKIITRGLE IVRRDWSEIA KETQAKVLEA ILKHGNVEEA |
| | | VKIVKEVTEK LSKYEIPPEK LVIYEQITRP LHEYKAIGPH |
| | | VAVAKRLAAR GVKVRPGMVI GYIVLRGDGP ISKRAILAEE |
| | | FDLRKHKYDA EYYIENQVLP AVLRILEAFG YRKEDLRWQK |
| | | TX²QTGLTAWL NIKKSGTGGG GATVKFKYKG EEKEVDISKI |
| | | KKVWRVGKMI SFTYDEGGGK TGRGAVSEKD APKELLQMLE |
| | | KQKK; |
| | | wherein X² is selected from Q, N, H, S, T, Y, |
| | | C, M, W, A, I, L, F, V, P, and G; in some |
| | | embodiments, X² is selected from Q and N. |
| 101 | P36H K762Q K775S variant | MILDADYITE DGKPIIRIFK KENGEFKVEY DRNFRHYIYA |
| | of Deep Vent DNA | LLKDDSQIDE VRKITAERHG KIVRIIDAEK VRKKFLGRPI |
| | polymerase amino acid | EVWRLYFEHP QDVPAIRDKI REHSAVIDIF EYDIPFAKRY |
| | sequence with sequence non- | LIDKGLIPME GDEELKLLAF DIETLYHEGE EFAKGPIIMI |
| | specific DNA binding domain | SYADEEEAKV ITWKKIDLPY VEVVSSEREM IKRFLKVIRE |
| | | KDPDVIITYN GDSFDLPYLV KRAEKLGIKL PLGRDGSEPK |
| | | MQRLGDMTAV EIKGRIHFDL YHVIRRTINL PTYTLEAVYE |
| | | AIFGKPKEKV YAHEIAEAWE TGKGLERVAK YSMEDAKVTY |
| | | ELGREFFPME AQLSRLVGQP LWDVSRSSTG NLVEWYLLRK |
| | | AYERNELAPN KPDEREYERR LRESYAGGYV KEPEKGLWEG |
| | | LVSLDFRSLY PSIIITHNVS PDTLNREGCR EYDVAPEVGH |
| | | KFCKDFPGFI PSLLKRLLDE RQEIKRKMKA SKDPIEKKML |
| | | DYRQRAIKIL ANSYYGYYGY AKARWYCKEC AESVTAWGRE |
| | | YIEFVRKELE EKFGFKVLYI DTDGLYATIP GAKPEEIKKK |
| | | ALEFVDYINA KLPGLLELEY EGFYVRGFFV TKKKYALIDE |
| | | EGKIITRGLE IVRRDWSEIA KETQAKVLEA ILKHGNVEEA |
| | | VKIVKEVTEK LSKYEIPPEK LVIYEQITRP LHEYKAIGPH |
| | | VAVAKRLAAR GVKVRPGMVI GYIVLRGDGP ISKRAILAEE |
| | | FDLRKHKYDA EYYIENQVLP AVLRILEAFG YRKEDLRWQK |
| | | TQQTGLTAWL NIKKSGTGGG GATVKFKYKG EEKEVDISKI |
| | | KKVWRVGKMI SFTYDEGGGK TGRGAVSEKD APKELLQMLE |
| | | KQKK |
| 102 | P36H K764X² variant of | MILDTDYITK DGKPIIRIFK KENGEFKIEL DPHFQHYIYA |
| | Thermococcus litoralis DNA | LLKDDSAIEE IKAIKGERHG KTVRVLDAVK VRKKFLGREV |
| | polymerase | EVWKLIFEHP QDVPAMRGKI REHPAVVDIY EYDIPFAKRY |
| | | LIDKGLIPME GDEELKLLAF DIETFYHEGD EFGKGEIIMI |
| | | SYADEEEARV ITWKNIDLPY VDVVSNEREM IKRFVQVVKE |
| | | KDPDVIITYN GDNFDLPYLI KRAEKLGVRL VLGRDKEHPE |
| | | PKIQRMGDSF AVEIKGRIHF DLFPVVRRTI NLPTYTLEAV |
| | | YEAVLGKTKS KLGAEEIAAI WETEESMKKL AQYSMEDARA |
| | | TYELGKEFFP MEAELAKLIG QSVWDVSRSS TGNLVEWYLL |
| | | RVAYARNELA PNKPDEEEYK RRLRTTYLGG YVKEPEKGLW |
| | | ENIIYLDFRS LYPSIIVTHN VSPDTLEKEG CKNYDVAPIV |
| | | GYRFCKDFPG FIPSILGDLI AMRQDIKKKM KSTIDPIEKK |
| | | MLDYRQRAIK LLANSYYGYM GYPKARWYSK ECAESVTAWG |
| | | RHYIEMTIRE IEEKFGFKVL YADTDGFYAT IPGEKPELIK |
| | | KKAKEFLNYI NSKLPGLLEL EYEGFYLRGF FVTKKRYAVI |
| | | DEEGRITTRG LEVVRRDWSE IAKETQAKVL EAILKEGSVE |
| | | KAVEVVRDVV EKIAKYRVPL EKLVIHEQIT RDLKDYKAIG |
| | | PHVAIAKRLA ARGIKVKPGT IISYIVLKGS GKISDRVILL |
| | | TEYDPRKHKY DPDYYIENQV LPAVLRILEA FGYRKEDLRY |
| | | QSSX²QTGLDA WLKR; |
| | | wherein X² is selected from Q, N, H, S, T, Y, |
| | | C, M, W, A, I, L, F, V, P, and G; in some |
| | | embodiments, X² is selected from Q and N. |
| 103 | P36H K764Q variant of | MILDTDYITK DGKPIIRIFK KENGEFKIEL DPHFQHYIYA |
| | Thermococcus litoralis DNA | LLKDDSAIEE IKAIKGERHG KTVRVLDAVK VRKKFLGREV |
| | polymerase | EVWKLIFEHP QDVPAMRGKI REHPAVVDIY EYDIPFAKRY |
| | | LIDKGLIPME GDEELKLLAF DIETFYHEGD EFGKGEIIMI |
| | | SYADEEEARV ITWKNIDLPY VDVVSNEREM IKRFVQVVKE |
| | | KDPDVIITYN GDNFDLPYLI KRAEKLGVRL VLGRDKEHPE |
| | | PKIQRMGDSF AVEIKGRIHF DLFPVVRRTI NLPTYTLEAV |
| | | YEAVLGKTKS KLGAEEIAAI WETEESMKKL AQYSMEDARA |
| | | TYELGKEFFP MEAELAKLIG QSVWDVSRSS TGNLVEWYLL |
| | | RVAYARNELA PNKPDEEEYK RRLRTTYLGG YVKEPEKGLW |
| | | ENIIYLDFRS LYPSIIVTHN VSPDTLEKEG CKNYDVAPIV |
| | | GYRFCKDFPG FIPSILGDLI AMRQDIKKKM KSTIDPIEKK |
| | | MLDYRQRAIK LLANSYYGYM GYPKARWYSK ECAESVTAWG |
| | | RHYIEMTIRE IEEKFGFKVL YADTDGFYAT IPGEKPELIK |
| | | KKAKEFLNYI NSKLPGLLEL EYEGFYLRGF FVTKKRYAVI |
| | | DEEGRITTRG LEVVRRDWSE IAKETQAKVL EAILKEGSVE |
| | | KAVEVVRDVV EKIAKYRVPL EKLVIHEQIT RDLKDYKAIG |
| | | PHVAIAKRLA ARGIKVKPGT IISYIVLKGS GKISDRVILL |
| | | TEYDPRKHKY DPDYYIENQV LPAVLRILEA FGYRKEDLRY |
| | | QSSQQTGLDA WLKR |
| 104 | P36H K764X² variant of | MILDTDYITK DGKPIIRIFK KENGEFKIEL DPHFQHYIYA |
| | Thermococcus litoralis DNA | LLKDDSAIEE IKAIKGERHG KSVRVVDAVK VKKKFLGREV |
| | polymerase, sequence 2 (acc. | EVWKLIFEHP QDVPAMRDKI KEHPAVIDIY EYDIPFAKRY |
| | ADK47977.1) | LIDKGLIPME GDEELKLLAF DIETFYHEGD EFGKGEIIMI |
| | | SYADEEEARV ITWKNIDLPY VDVVSNEREM IKRFVQVVKE |
| | | KDPDVIITYN GDNFDLPYLI KRAEKLGVRL VLGRDKENPE |
| | | PKIQRMGDSF AVEIKGRIHF DLFPVVRRTI NLPTYTLEAV |
| | | YEAVLGKTKS KLGAEEIAAI WETEESMKKL AQYSMEDARA |
| | | TYELGKEFFP MEAELAKLIG QSVWDVSRSS TGNLVEWYLL |
| | | RVAYERNELA PNKPDEEEYK RRLRTTYLGG YVKEPEKGLW |
| | | ENIIYLDFRS LYPSIIVTHN VSPDTLEKEG CENYDIAPIV |
| | | SYRFCKDFPG FIPSILGDLI AMRQEIKKKM KATIDPVERK |
| | | MLDYRQRAVK LLANSYYGYM GYPKARWYSK ECAESVTAWG |
| | | RHYIEMTIKE IEEKFGFKVL YADTDGFYAT ISGEKPEIIK |
| | | KKAREFLNYI NSKLPGLLEL EYEGFYLRGF FVTKKRYAVI |
| | | DEEGRITTRG LEVVRRDWSE IAKETQAKVL EAILKDGSVE |
| | | KAVEIVRDVL EKIAKYRVPL EKLVIHEQIT RDLKDYKAIG |
| | | PHVAIAKRLA ARGIKVKPGT IISYIVLKGS GKISDRVILL |
| | | TEYDPEKHKY DPDYYIENQV LPAVLRILEA FGYRKEDLRY |
| | | QSSX²QTGLDA WLKR; |
| | | wherein X² is selected from Q, N, H, S, T, Y, |
| | | C, M, W, A, I, L, F, V, P, and G; in some |
| | | embodiments, X² is selected from Q and N. |
| 105 | P36H K764Q variant of | MILDTDYITK DGKPIIRIFK KENGEFKIEL DPHFQHYIYA |
| | Thermococcus litoralis DNA | LLKDDSAIEE IKAIKGERHG KSVRVVDAVK VKKKFLGREV |
| | polymerase, sequence 2 (acc. | EVWKLIFEHP QDVPAMRDKI KEHPAVIDIY EYDIPFAKRY |
| | ADK47977.1) | LIDKGLIPME GDEELKLLAF DIETFYHEGD EFGKGEIIMI |
| | | SYADEEEARV ITWKNIDLPY VDVVSNEREM IKRFVQVVKE |
| | | KDPDVIITYN GDNFDLPYLI KRAEKLGVRL VLGRDKENPE |
| | | PKIQRMGDSF AVEIKGRIHF DLFPVVRRTI NLPTYTLEAV |
| | | YEAVLGKTKS KLGAEEIAAI WETEESMKKL AQYSMEDARA |
| | | TYELGKEFFP MEAELAKLIG QSVWDVSRSS TGNLVEWYLL |
| | | RVAYERNELA PNKPDEEEYK RRLRTTYLGG YVKEPEKGLW |
| | | ENIIYLDFRS LYPSIIVTHN VSPDTLEKEG CENYDIAPIV |
| | | SYRFCKDFPG FIPSILGDLI AMRQEIKKKM KATIDPVERK |
| | | MLDYRQRAVK LLANSYYGYM GYPKARWYSK ECAESVTAWG |
| | | RHYIEMTIKE IEEKFGFKVL YADTDGFYAT ISGEKPEIIK |
| | | KKAREFLNYI NSKLPGLLEL EYEGFYLRGF FVTKKRYAVI |
| | | DEEGRITTRG LEVVRRDWSE IAKETQAKVL EAILKDGSVE |
| | | KAVEIVRDVL EKIAKYRVPL EKLVIHEQIT RDLKDYKAIG |
| | | PHVAIAKRLA ARGIKVKPGT IISYIVLKGS GKISDRVILL |
| | | TEYDPEKHKY DPDYYIENQV LPAVLRILEA FGYRKEDLRY |
| | | QSSQQTGLDA WLKR |
| 106 | P36H R761X² variant of | MILDTDYITE DGKPVIRIFK KENGEFKIDY DRNFEHYIYA |
| | Thermococcus gorgonarius | LLKDDSAIED VKKITAERHG TTVRVVRAEK VKKKFLGRPI |
| | DNA polymerase | EVWKLYFTHP QDVPAIRDKI KEHPAVVDIY EYDIPFAKRY |
| | | LIDKGLIPME GDEELKMLAF DIETLYHEGE EFAEGPILMI |
| | | SYADEEGARV ITWKNIDLPY VDVVSTEKEM IKRFLKVVKE |
| | | KDPDVLITYN GDNFDFAYLK KRSEKLGVKF ILGREGSEPK |
| | | IQRMGDRENV EVKGRIHFDL YPVIRRTINL PTYTLEAVYE |
| | | AIFGQPKEKV YAEEIAQAWE TGEGLERVAR YSMEDAKVTY |
| | | ELGKEFFPME AQLSRLVGQS LWDVSRSSTG NLVEWFLLRK |
| | | AYERNELAPN KPDERELARR RESYAGGYVK EPERGLWENI |
| | | VYLDFRSLYP SIIITHNVSP DTLNREGCEE YDVAPQVGHK |
| | | FCKDFPGFIP SLLGDLLEER QKVKKKMKAT IDPIEKKLLD |
| | | YRQRAIKILA NSFYGYYGYA KARWYCKECA ESVTAWGRQY |
| | | IETTIREIEE KFGFKVLYAD TDGFFATIPG ADAETVKKKA |
| | | KEFLDYINAK LPGLLELEYE GFYKRGFFVT KKKYAVIDEE |
| | | DKITTRGLEI VRRDWSEIAK ETQARVLEAI LKHGDVEEAV |
| | | RIVKEVTEKL SKYEVPPEKL VIYEQITRDL KDYKATGPHV |
| | | AVAKRLAARG IKIRPGTVIS YIVLKGSGRI GDRAIPFDEF |
| | | DPAKHKYDAE YYIENQVLPA VERILRAFGY RKEDLRYQKT |
| | | X²QVGLGAWLK PKT; |
| | | wherein X² is selected from Q, N, H, S, T, Y, |
| | | C, M, W, A, I, L, F, V, P, and G; in some |
| | | embodiments, X² is selected from Q and N. |
| 107 | P36H R761Q variant of | MILDTDYITE DGKPVIRIFK KENGEFKIDY DRNFEHYIYA |
| | Thermococcus gorgonarius | LLKDDSAIED VKKITAERHG TTVRVVRAEK VKKKFLGRPI |
| | DNA polymerase | EVWKLYFTHP QDVPAIRDKI KEHPAVVDIY EYDIPFAKRY |
| | | LIDKGLIPME GDEELKMLAF DIETLYHEGE EFAEGPILMI |
| | | SYADEEGARV ITWKNIDLPY VDVVSTEKEM IKRFLKVVKE |
| | | KDPDVLITYN GDNFDFAYLK KRSEKLGVKF ILGREGSEPK |
| | | IQRMGDRENV EVKGRIHFDL YPVIRRTINL PTYTLEAVYE |
| | | AIFGQPKEKV YAEEIAQAWE TGEGLERVAR YSMEDAKVTY |
| | | ELGKEFFPME AQLSRLVGQS LWDVSRSSTG NLVEWFLLRK |
| | | AYERNELAPN KPDERELARR RESYAGGYVK EPERGLWENI |
| | | VYLDFRSLYP SIIITHNVSP DTLNREGCEE YDVAPQVGHK |
| | | FCKDFPGFIP SLLGDLLEER QKVKKKMKAT IDPIEKKLLD |
| | | YRQRAIKILA NSFYGYYGYA KARWYCKECA ESVTAWGRQY |
| | | IETTIREIEE KFGFKVLYAD TDGFFATIPG ADAETVKKKA |
| | | KEFLDYINAK LPGLLELEYE GFYKRGFFVT KKKYAVIDEE |
| | | DKITTRGLEI VRRDWSEIAK ETQARVLEAI LKHGDVEEAV |
| | | RIVKEVTEKL SKYEVPPEKL VIYEQITRDL KDYKATGPHV |
| | | AVAKRLAARG IKIRPGTVIS YIVLKGSGRI GDRAIPFDEF |
| | | DPAKHKYDAE YYIENQVLPA VERILRAFGY RKEDLRYQKT |
| | | QQVGLGAWLK PKT |
| 108 | P36H R761X² variant of | MILDTDYITE DGKPVIRIFK KENGEFKIEY DRTFEHYFYA |
| | Thermococcus kodakarensis | LLKDDSAIEE VKKITAERHG TVVTVKRVEK VQKKFLGRPV |
| | DNA polymerase | EVWKLYFTHP QDVPAIRDKI REHPAVIDIY EYDIPFAKRY |
| | | LIDKGLVPME GDEELKMLAF DIETLYHEGE EFAEGPILMI |
| | | SYADEEGARV ITWKNVDLPY VDVVSTEREM IKRFLRVVKE |
| | | KDPDVLITYN GDNFDFAYLK KRCEKLGINF ALGRDGSEPK |
| | | IQRMGDRFAV EVKGRIHFDL YPVIRRTINL PTYTLEAVYE |
| | | AVFGQPKEKV YAEEITTAWE TGENLERVAR YSMEDAKVTY |
| | | ELGKEFLPME AQLSRLIGQS LWDVSRSSTG NLVEWFLLRK |
| | | AYERNELAPN KPDEKELARR RQSYEGGYVK EPERGLWENI |
| | | VYLDFRSLYP SIIITHNVSP DTLNREGCKE YDVAPQVGHR |
| | | FCKDFPGFIP SLLGDLLEER QKIKKKMKAT IDPIERKLLD |
| | | YRQRAIKILA NSYYGYYGYA RARWYCKECA ESVTAWGREY |
| | | ITMTIKEIEE KYGFKVIYSD TDGFFATIPG ADAETVKKKA |
| | | MEFLKYINAK LPGALELEYE GFYKRGFFVT KKKYAVIDEE |
| | | GKITTRGLEI VRRDWSEIAK ETQARVLEAL LKDGDVEKAV |
| | | RIVKEVTEKL SKYEVPPEKL VIHEQITRDL KDYKATGPHV |
| | | AVAKRLAARG VKIRPGTVIS YIVLKGSGRI GDRAIPFDEF |
| | | DPTKHKYDAE YYIENQVLPA VERILRAFGY RKEDLRYQKT |
| | | X²QVGLSAWLK PKGT; |
| | | wherein X² is selected from Q, N, H, S, T, Y, |
| | | C, M, W, A, I, L, F, V, P, and G; in some |
| | | embodiments, X² is selected from Q and N. |
| 109 | P36H R761Q variant of | MILDTDYITE DGKPVIRIFK KENGEFKIEY DRTFEHYFYA |
| | Thermococcus kodakarensis | LLKDDSAIEE VKKITAERHG TVVTVKRVEK VQKKFLGRPV |
| | DNA polymerase | EVWKLYFTHP QDVPAIRDKI REHPAVIDIY EYDIPFAKRY |
| | | LIDKGLVPME GDEELKMLAF DIETLYHEGE EFAEGPILMI |
| | | SYADEEGARV ITWKNVDLPY VDVVSTEREM IKRFLRVVKE |
| | | KDPDVLITYN GDNFDFAYLK KRCEKLGINF ALGRDGSEPK |
| | | IQRMGDRFAV EVKGRIHFDL YPVIRRTINL PTYTLEAVYE |
| | | AVFGQPKEKV YAEEITTAWE TGENLERVAR YSMEDAKVTY |
| | | ELGKEFLPME AQLSRLIGQS LWDVSRSSTG NLVEWFLLRK |
| | | AYERNELAPN KPDEKELARR RQSYEGGYVK EPERGLWENI |
| | | VYLDFRSLYP SIIITHNVSP DTLNREGCKE YDVAPQVGHR |
| | | FCKDFPGFIP SLLGDLLEER QKIKKKMKAT IDPIERKLLD |
| | | YRQRAIKILA NSYYGYYGYA RARWYCKECA ESVTAWGREY |
| | | ITMTIKEIEE KYGFKVIYSD TDGFFATIPG ADAETVKKKA |
| | | MEFLKYINAK LPGALELEYE GFYKRGFFVT KKKYAVIDEE |
| | | GKITTRGLEI VRRDWSEIAK ETQARVLEAL LKDGDVEKAV |
| | | RIVKEVTEKL SKYEVPPEKL VIHEQITRDL KDYKATGPHV |
| | | AVAKRLAARG VKIRPGTVIS YIVLKGSGRI GDRAIPFDEF |
| | | DPTKHKYDAE YYIENQVLPA VERILRAFGY RKEDLRYQKT |
| | | QQVGLSAWLK PKGT |
| 110 | P36H K761X² variant of | MILDTDYITE NGKPVIRVFK KENGEFKIEY DRTFEHYFYA |
| | Thermococcus species 9o N-7 | LLKDDSAIED VKKVTAKRHG TVVKVKRAEK VQKKFLGRPI |
| | DNA polymerase | EVWKLYFNHP QDVPAIRDRI RAHPAVVDIY EYDIPFAKRY |
| | | LIDKGLIPME GDEELTMLAF DIETLYHEGE EFGTGPILMI |
| | | SYADGSEARV ITWKKIDLPY VDVVSTEKEM IKRFLRVVRE |
| | | KDPDVLITYN GDNFDFAYLK KRCEELGIKF TLGRDGSEPK |
| | | IQRMGDRFAV EVKGRIHFDL YPVIRRTINL PTYTLEAVYE |
| | | AVFGKPKEKV YAEEIAQAWE SGEGLERVAR YSMEDAKVTY |
| | | ELGREFFPME AQLSRLIGQS LWDVSRSSTG NLVEWFLLRK |
| | | AYKRNELAPN KPDERELARR RGGYAGGYVK EPERGLWDNI |
| | | VYLDFRSLYP SIIITHNVSP DTLNREGCKE YDVAPEVGHK |
| | | FCKDFPGFIP SLLGDLLEER QKIKRKMKAT VDPLEKKLLD |
| | | YRQRAIKILA NSFYGYYGYA KARWYCKECA ESVTAWGREY |
| | | IEMVIRELEE KFGFKVLYAD TDGLHATIPG ADAETVKKKA |
| | | KEFLKYINPK LPGLLELEYE GFYVRGFFVT KKKYAVIDEE |
| | | GKITTRGLEI VRRDWSEIAK ETQARVLEAI LKHGDVEEAV |
| | | RIVKEVTEKL SKYEVPPEKL VIHEQITRDL RDYKATGPHV |
| | | AVAKRLAARG VKIRPGTVIS YIVLKGSGRI GDRAIPADEF |
| | | DPTKHRYDAE YYIENQVLPA VERILKAFGY RKEDLRYQKT |
| | | X²QVGLGAWLK VKGKK; |
| | | wherein X² is selected from Q, N, H, S, T, Y, |
| | | C, M, W, A, I, L, F, V, P, and G; in some |
| | | embodiments, X² is selected from Q and N. |
| 111 | P36H K761Q variant of | MILDTDYITE NGKPVIRVFK KENGEFKIEY DRTFEHYFYA |
| | Thermococcus species 9o N-7 | LLKDDSAIED VKKVTAKRHG TVVKVKRAEK VQKKFLGRPI |
| | DNA polymerase | EVWKLYFNHP QDVPAIRDRI RAHPAVVDIY EYDIPFAKRY |
| | | LIDKGLIPME GDEELTMLAF DIETLYHEGE EFGTGPILMI |
| | | SYADGSEARV ITWKKIDLPY VDVVSTEKEM IKRFLRVVRE |
| | | KDPDVLITYN GDNFDFAYLK KRCEELGIKF TLGRDGSEPK |
| | | IQRMGDRFAV EVKGRIHFDL YPVIRRTINL PTYTLEAVYE |
| | | AVFGKPKEKV YAEEIAQAWE SGEGLERVAR YSMEDAKVTY |
| | | ELGREFFPME AQLSRLIGQS LWDVSRSSTG NLVEWFLLRK |
| | | AYKRNELAPN KPDERELARR RGGYAGGYVK EPERGLWDNI |
| | | VYLDFRSLYP SIIITHNVSP DTLNREGCKE YDVAPEVGHK |
| | | FCKDFPGFIP SLLGDLLEER QKIKRKMKAT VDPLEKKLLD |
| | | YRQRAIKILA NSFYGYYGYA KARWYCKECA ESVTAWGREY |
| | | IEMVIRELEE KFGFKVLYAD TDGLHATIPG ADAETVKKKA |
| | | KEFLKYINPK LPGLLELEYE GFYVRGFFVT KKKYAVIDEE |
| | | GKITTRGLEI VRRDWSEIAK ETQARVLEAI LKHGDVEEAV |
| | | RIVKEVTEKL SKYEVPPEKL VIHEQITRDL RDYKATGPHV |
| | | AVAKRLAARG VKIRPGTVIS YIVLKGSGRI GDRAIPADEF |
| | | DPTKHRYDAE YYIENQVLPA VERILKAFGY RKEDLRYQKT |
| | | QQVGLGAWLK VKGKK |
| 112 | P40H E775Q variant of | MRFWPLDATY SVVGGVPEVR VFGVDGEGRR VVLVDRRFRH |
| | Pyrobaculum calidifontis DNA | YFYAKCDKCD ASLAKSYLSR VAPVEAVEVV ERRFFGRPTI |
| | polymerase | FLKVVAKVPE DVRKLREAAL GAPGVVDVYE ADIRYYMRYM |
| | | IDKGVVPCAW NVVEAREAGK LGPLPLYEVV EWAGVEEGFP |
| | | PPLRVLAFDI EVYNERGSPD PLRDPVVMLA VKTSDGREEV |
| | | FEAEGRDDRR VIRGFVDFVK EFDPDVIVGY NSNGFDWPYL |
| | | SERAKALGVP LRVDRLGGVP QQSVYGHWSV VGRANVDLYN |
| | | IVDEFPEIKV KTLDRVAEYF GVMKRSERVL IPGHKVYEYW |
| | | NDPAKRPTLM RYVLDDVRST LGLAEKLLPF LIQLSSVSGL |
| | | PLDQVAAASV GNRVEWMLLR YAYRMGEVAP NREEREYEPY |
| | | KGAIVLEPKP GLYSDVLVLD FSSMYPNIMM KYNLSPDTYL |
| | | EPHEPDPPEG VVVAPEVGHR FRKAPTGFIP AVLKHLVELR |
| | | RAVREEAKKY PPDSPEYRLL DERQRALKVM ANAMYGYLGW |
| | | VGARWYKKEV AESVTAFARA ILLDVVEYAK RLGIEVIYGD |
| | | TDSLFVKKSG AVDRLVKYVE ERHGIEIKVD KDYERVLFTE |
| | | AKKRYAGLLR DGRIDIVGFE VVRGDWCELA KEVQLNVVEL |
| | | ILKSKSVGEA RERVVKYVRE VVERLKAYKF DLDDLIIWKT |
| | | LDKELDEYKA YGPHVHAALE LKRRGYKVGK GTTVGYVIVR |
| | | GPGKVSERAM PYIFVDDASK VDVDYYIEKQ VIPAALRIAE |
| | | VLGVKESDLK TGRVQKSLLD FLG |
| 113 | P42H E778Q variant of | MKFKLWPLDA TYSVVGGVPE VRIFGISESG DRVVVVDRRF |
| | Pyrobaculum aerophilum DNA | RHYFYADCPA CDPESVRSQL GRVAPVEEVV AVERRYLGRP |
| | polymerase | RSFLKIVARV PEDVRKLREA AAALPGVSGV YEADIRFYMR |
| | | YMLDMGVVPC SWNTVDAEAT GEKLGNLPVY KVAEWGGVTE |
| | | GFPPPLRVLA FDIEVYNERG TPDPLRDPVI LLAVQASDGR |
| | | VEVFEASGRD DRSVLRSFID FVREFDPDVI VGYNSNQFDW |
| | | PYLAERARAL GIPLKVDRVG GAPQQSVYGH WSVTGRANVD |
| | | LYNIVDEFPE IKLKTLDRVA EYFGVMKREE RVLVPGHKIY |
| | | EYWRDQGKRP LLRQYVIDDV KSTYGLAEKL LPFLIQLSSV |
| | | SGLPLDQVAA ASVGNRVEWM LLRYAYRLGE VAPNREEREY |
| | | EPYKGAIVLE PRPGLYSDVL ALDFSSMYPN IMMKYNLSPD |
| | | TYLERGEPDP PGGVYVAPEV GHRFRREPPG FIPLVLRQLI |
| | | ELRKRVREEL KKYPPDSPEY RVLDERQRAL KIMANAMYGY |
| | | TGWVGARWYK KEVAESVTAF ARAILKDVIE YARKAGIVVI |
| | | YGDTDSLFVK KSGDVEKLVK YVEEKYGIDI KIDKDYSTVL |
| | | FTEAKKRYAG LLRDGRIDIV GFEVVRGDWS ELAKEVQLRV |
| | | IELILTSRDV SEARQKVVKY VRGVIDKLRN YEVDLDDLII |
| | | WKTLDKELDE YKAYPPHVHA AILLKKRGYK VGKGTTIGYV |
| | | VVKGGEKVSE RAVPYIFIDD IEKIDLDYYV ERQVIPAALR |
| | | IAEVIGIKEG DLKTGRSQRT LLDFF |
| 114 | Pyrococcus DNA polymerase | MILDADYITE EGKPVIRLFK KENGEFKIEH DRTFRHYIYA |
| | sequence including | LLKDDSKIEE VKKITAERHG KIVRIVDAEK VEKKFLGRPI |
| | exonuclease domain and | TVWRLYFEHP QDVPTIREKI REHSAVVDIF EYDIPFAKRY |
| | catalytic domain, P36H | LIDKGLIPME GDEELKLLAF DIETLYHEGE EFGKGPIIMI |
| | | SYADEEEAKV ITWKKIDLPY VEVVSSEREM IKRFLKIIRE |
| | | KDPDIIITYN GDSFDLPYLA KRAEKLGIKL TIGRDGSEPK |
| | | MQRIGDMTAV EVKGRIHFDL YHVIRRTINL PTYTLEAVYE |
| | | AIFGKPKEKV YADEIAKAWE TGEGLERVAK YSMEDAKATY |
| | | ELGKEFFPME AQLSRLVGQP LWDVSRSSTG NLVEWFLLRK |
| | | AYERNELAPN KPDEREYERR LRESYAGGFV KEPEKGLWEN |
| | | IVSLDFRALY PSIIITHNVS PDTLNREGCR NYDVAPEVGH |
| | | KFCKDFPGFI PSLLKRLLDE RQKIKTKMKA SQDPIEKIML |
| | | DYRQRAIKIL ANSYYGYYGY AKARWYCKEC AESVTAWGRE |
| | | YIEFVWKELE EKFGFKVLYI DTDGLYATIP GGKSEEIKKK |
| | | ALEFVDYINA KLPGLLELEY EGFYKRGFFV TKKKYALIDE |
| | | EGKIITRGLE IVRRDWSEIA KETQARVLEA ILKHGNVEEA |
| | | VRIVKEVTQK LSKYEIPPEK LAIYEQITRP LHEYKAIGPH |
| | | VAVAKRLAAK GVKIKPGMVI GYIVLRGDGP ISNRAILAEE |
| | | YDPRKHKYDA EYYIENQVLP AVLRILEGFG YRKEDLRWQK |
| | | TKQTGL |
| 115 | Pyrococcus DNA polymerase | MILDADYITE EGKPVIRLFK KENGEFKIEH DRTFRHYIYA |
| | N-terminal domain comprising | LLKDDSKIEE VKKITAERHG KIVRIVDAEK VEKKFLGRPI |
| | a uracil-binding pocket, P36H | TVWRLYFEHP QDVPTIREKI REHSAVVDIF EYDIPFAKRY |
| | | LIDKGLIPME G |
| 116 | Pfu DNA polymerase | MILDVDYITE EGKPVIRLFK KENGKFKIEH DRTFRHYIYA |
| | (GenBank Acc. No. | LLRDDSKIEE VKKITGERHG KIVRIVDVEK VEKKFLGKPI |
| | WP_011011325.1) N-terminal | TVWKLYLEHP QDVPTIREKV REHPAVVDIF EYDIPFAKRY |
| | domain comprising a uracil- | LIDKGLIPME G |
| | binding pocket, P36H | |
| 117 | Deep Vent DNA polymerase | MILDADYITE DGKPIIRIFK KENGEFKVEY DRNFRHYIYA |
| | N-terminal domain comprising | LLKDDSQIDE VRKITAERHG KIVRIIDAEK VRKKFLGRPI |
| | a uracil-binding pocket, P36H | EVWRLYFEHP QDVPAIRDKI REHSAVIDIF EYDIPFAKRY |
| | | LIDKGLIPME G |
| 118 | Thermococcus litoralis DNA | MILDTDYITK DGKPIIRIFK KENGEFKIEL DPHFQHYIYA |
| | polymerase N-terminal domain | LLKDDSAIEE IKAIKGERHG KTVRVLDAVK VRKKFLGREV |
| | comprising a uracil-binding | EVWKLIFEHP QDVPAMRGKI REHPAVVDIY EYDIPFAKRY |
| | pocket, P36H | LIDKGLIPME G |
| 119 | Thermococcus gorgonarius | MILDTDYITE DGKPVIRIFK KENGEFKIDY DRNFEHYIYA |
| | DNA polymerase N-terminal | LLKDDSAIED VKKITAERHG TTVRVVRAEK VKKKFLGRPI |
| | domain comprising a uracil- | EVWKLYFTHP QDVPAIRDKI KEHPAVVDIY EYDIPFAKRY |
| | binding pocket, P36H | LIDKGLIPME G |
| 120 | Thermococcus kodakarensis | MILDTDYITE DGKPVIRIFK KENGEFKIEY DRTFEHYFYA |
| | DNA polymerase N-terminal | LLKDDSAIEE VKKITAERHG TVVTVKRVEK VQKKFLGRPV |
| | domain comprising a uracil- | EVWKLYFTHP QDVPAIRDKI REHPAVIDIY EYDIPFAKRY |
| | binding pocket, P36H | LIDKGLVPME G |
| 121 | Thermococcus species 9o N-7 | MILDTDYITE NGKPVIRVFK KENGEFKIEY DRTFEHYFYA |
| | DNA polymerase N-terminal | LLKDDSAIED VKKVTAKRHG TVVKVKRAEK VQKKFLGRPI |
| | domain comprising a uracil- | EVWKLYFNHP QDVPAIRDRI RAHPAVVDIY EYDIPFAKRY |
| | binding pocket, P36H | LIDKGLIPME G |
| 127 | Pfu GenBank | MILDVDYITE EGKPVIRLFK KENGKFKIEH DRTFRX¹YIYA |
| | WP_011011325.1 P36X¹ | LLRDDSKIEE VKKITGERHG KIVRIVDVEK VEKKFLGKPI |
| | R762X² amino acid sequence | TVWKLYLEHP QDVPTIREKV REHPAVVDIF EYDIPFAKRY |
| | | LIDKGLIPME GEEELKILAF DIETLYHEGE EFGKGPIIMI |
| | | SYADENEAKV ITWKNIDLPY VEVVSSEREM IKRFLRIIRE |
| | | KDPDIIVTYN GDSFDFPYLA KRAEKLGIKL TIGRDGSEPK |
| | | MQRIGDMTAV EVKGRIHFDL YHVITRTINL PTYTLEAVYE |
| | | AIFGKPKEKV YADEIAKAWE SGENLERVAK YSMEDAKATY |
| | | ELGKEFLPME IQLSRLVGQP LWDVSRSSTG NLVEWFLLRK |
| | | AYERNEVAPN KPSEEEYQRR LRESYTGGFV KEPEKGLWEN |
| | | IVYLDFRALY PSIIITHNVS PDTLNLEGCK NYDIAPQVGH |
| | | KFCKDIPGFI PSLLGHLLEE RQKIKTKMKE TQDPIEKILL |
| | | DYRQKAIKLL ANSFYGYYGY AKARWYCKEC AESVTAWGRK |
| | | YIELVWKELE EKFGFKVLYI DTDGLYATIP GGESEEIKKK |
| | | ALEFVKYINS KLPGLLELEY EGFYKRGFFV TKKRYAVIDE |
| | | EGKVITRGLE IVRRDWSEIA KETQARVLET ILKHGDVEEA |
| | | VRIVKEVIQK LANYEIPPEK LAIYEQITRP LHEYKAIGPH |
| | | VAVAKKLAAK GVKIKPGMVI GYIVLRGDGP ISNRAILAEE |
| | | YDPKKHKYDA EYYIENQVLP AVLRILEGFG YRKEDLRYQK |
| | | TX²QVGLTSWL NIKKS; |
| | | wherein X¹ is any amino acid other than P; in |
| | | some embodiments, X¹ is selected from Q, N, |
| | | H, S, T, Y, C, M, W, A, I, L, F, V, G; in |
| | | some embodiments, X¹ is H; and |
| | | wherein X² is selected from Q, N, H, S, T, Y, |
| | | C, M, W, A, I, L, F, V, P, and G; in some |
| | | embodiments, X² is selected from Q and N. |
| 128 | Pfu GenBank | MILDVDYITE EGKPVIRLFK KENGKFKIEH DRTFRX¹YIYA |
| | WP_011011325.1 P36X¹ | LLRDDSKIEE VKKITGERHG KIVRIVDVEK VEKKFLGKPI |
| | R762Q amino acid sequence | TVWKLYLEHP QDVPTIREKV REHPAVVDIF EYDIPFAKRY |
| | | LIDKGLIPME GEEELKILAF DIETLYHEGE EFGKGPIIMI |
| | | SYADENEAKV ITWKNIDLPY VEVVSSEREM IKRFLRIIRE |
| | | KDPDIIVTYN GDSFDFPYLA KRAEKLGIKL TIGRDGSEPK |
| | | MQRIGDMTAV EVKGRIHFDL YHVITRTINL PTYTLEAVYE |
| | | AIFGKPKEKV YADEIAKAWE SGENLERVAK YSMEDAKATY |
| | | ELGKEFLPME IQLSRLVGQP LWDVSRSSTG NLVEWFLLRK |
| | | AYERNEVAPN KPSEEEYQRR LRESYTGGFV KEPEKGLWEN |
| | | IVYLDFRALY PSIIITHNVS PDTLNLEGCK NYDIAPQVGH |
| | | KFCKDIPGFI PSLLGHLLEE RQKIKTKMKE TQDPIEKILL |
| | | DYRQKAIKLL ANSFYGYYGY AKARWYCKEC AESVTAWGRK |
| | | YIELVWKELE EKFGFKVLYI DTDGLYATIP GGESEEIKKK |
| | | ALEFVKYINS KLPGLLELEY EGFYKRGFFV TKKRYAVIDE |
| | | EGKVITRGLE IVRRDWSEIA KETQARVLET ILKHGDVEEA |
| | | VRIVKEVIQK LANYEIPPEK LAIYEQITRP LHEYKAIGPH |
| | | VAVAKKLAAK GVKIKPGMVI GYIVLRGDGP ISNRAILAEE |
| | | YDPKKHKYDA EYYIENQVLP AVLRILEGFG YRKEDLRYQK |
| | | TQQVGLTSWL NIKKS; |
| | | wherein X¹ is any amino acid other than P; in |
| | | some embodiments, X¹ is selected from Q, N, |
| | | H, S, T, Y, C, M, W, A, I, L, F, V, G; in |
| | | some embodiments, X¹ is H. |
| 129 | Pfu GenBank | MILDVDYITE EGKPVIRLFK KENGKFKIEH DRTFRX¹YIYA |
| | WP_011011325.1 P36X¹ | LLRDDSKIEE VKKITGERHG KIVRIVDVEK VEKKFLGKPI |
| | A408S R762X² amino acid | TVWKLYLEHP QDVPTIREKV REHPAVVDIF EYDIPFAKRY |
| | sequence | LIDKGLIPME GEEELKILAF DIETLYHEGE EFGKGPIIMI |
| | | SYADENEAKV ITWKNIDLPY VEVVSSEREM IKRFLRIIRE |
| | | KDPDIIVTYN GDSFDFPYLA KRAEKLGIKL TIGRDGSEPK |
| | | MQRIGDMTAV EVKGRIHFDL YHVITRTINL PTYTLEAVYE |
| | | AIFGKPKEKV YADEIAKAWE SGENLERVAK YSMEDAKATY |
| | | ELGKEFLPME IQLSRLVGQP LWDVSRSSTG NLVEWFLLRK |
| | | AYERNEVAPN KPSEEEYQRR LRESYTGGFV KEPEKGLWEN |
| | | IVYLDFRSLY PSIIITHNVS PDTLNLEGCK NYDIAPQVGH |
| | | KFCKDIPGFI PSLLGHLLEE RQKIKTKMKE TQDPIEKILL |
| | | DYRQKAIKLL ANSFYGYYGY AKARWYCKEC AESVTAWGRK |
| | | YIELVWKELE EKFGFKVLYI DTDGLYATIP GGESEEIKKK |
| | | ALEFVKYINS KLPGLLELEY EGFYKRGFFV TKKRYAVIDE |
| | | EGKVITRGLE IVRRDWSEIA KETQARVLET ILKHGDVEEA |
| | | VRIVKEVIQK LANYEIPPEK LAIYEQITRP LHEYKAIGPH |
| | | VAVAKKLAAK GVKIKPGMVI GYIVLRGDGP ISNRAILAEE |
| | | YDPKKHKYDA EYYIENQVLP AVLRILEGFG YRKEDLRYQK |
| | | TX²QVGLTSWL NIKKS; |
| | | wherein X¹ is any amino acid other than P; in |
| | | some embodiments, X¹ is selected from Q, N, |
| | | H, S, T, Y, C, M, W, A, I, L, F, V, G; in |
| | | some embodiments, X¹ is H; and |
| | | wherein X² is selected from Q, N, H, S, T, Y, |
| | | C, M, W, A, I, L, F, V, P, and G; in some |
| | | embodiments, X² is selected from Q and N. |
| 130 | Pfu GenBank | MILDVDYITE EGKPVIRLFK KENGKFKIEH DRTFRX¹YIYA |
| | WP_011011325.1 P36X¹ | LLRDDSKIEE VKKITGERHG KIVRIVDVEK VEKKFLGKPI |
| | A408S R762Q amino acid | TVWKLYLEHP QDVPTIREKV REHPAVVDIF EYDIPFAKRY |
| | sequence | LIDKGLIPME GEEELKILAF DIETLYHEGE EFGKGPIIMI |
| | | SYADENEAKV ITWKNIDLPY VEVVSSEREM IKRFLRIIRE |
| | | KDPDIIVTYN GDSFDFPYLA KRAEKLGIKL TIGRDGSEPK |
| | | MQRIGDMTAV EVKGRIHFDL YHVITRTINL PTYTLEAVYE |
| | | AIFGKPKEKV YADEIAKAWE SGENLERVAK YSMEDAKATY |
| | | ELGKEFLPME IQLSRLVGQP LWDVSRSSTG NLVEWFLLRK |
| | | AYERNEVAPN KPSEEEYQRR LRESYTGGFV KEPEKGLWEN |
| | | IVYLDFRSLY PSIIITHNVS PDTLNLEGCK NYDIAPQVGH |
| | | KFCKDIPGFI PSLLGHLLEE RQKIKTKMKE TQDPIEKILL |
| | | DYRQKAIKLL ANSFYGYYGY AKARWYCKEC AESVTAWGRK |
| | | YIELVWKELE EKFGFKVLYI DTDGLYATIP GGESEEIKKK |
| | | ALEFVKYINS KLPGLLELEY EGFYKRGFFV TKKRYAVIDE |
| | | EGKVITRGLE IVRRDWSEIA KETQARVLET ILKHGDVEEA |
| | | VRIVKEVIQK LANYEIPPEK LAIYEQITRP LHEYKAIGPH |
| | | VAVAKKLAAK GVKIKPGMVI GYIVLRGDGP ISNRAILAEE |
| | | YDPKKHKYDA EYYIENQVLP AVLRILEGFG YRKEDLRYQK |
| | | TQQVGLTSWL NIKKS; |
| | | wherein X¹ is any amino acid other than P; in |
| | | some embodiments, X¹ is selected from Q, N, |
| | | H, S, T, Y, C, M, W, A, I, L, F, V, G; in |
| | | some embodiments, X¹ is H. |
| 131 | Pfu GenBank | MILDVDYITE EGKPVIRLFK KENGKFKIEH DRTFRX¹YIYA |
| | WP_011011325.1 P36X¹ | LLRDDSKIEE VKKITGERHG KIVRIVDVEK VEKKFLGKPI |
| | R762X² with DNA binding | TVWKLYLEHP QDVPTIREKV REHPAVVDIF EYDIPFAKRY |
| | domain amino acid sequence | LIDKGLIPME GEEELKILAF DIETLYHEGE EFGKGPIIMI |
| | | SYADENEAKV ITWKNIDLPY VEVVSSEREM IKRFLRIIRE |
| | | KDPDIIVTYN GDSFDFPYLA KRAEKLGIKL TIGRDGSEPK |
| | | MQRIGDMTAV EVKGRIHFDL YHVITRTINL PTYTLEAVYE |
| | | AIFGKPKEKV YADEIAKAWE SGENLERVAK YSMEDAKATY |
| | | ELGKEFLPME IQLSRLVGQP LWDVSRSSTG NLVEWFLLRK |
| | | AYERNEVAPN KPSEEEYQRR LRESYTGGFV KEPEKGLWEN |
| | | IVYLDFRALY PSIIITHNVS PDTLNLEGCK NYDIAPQVGH |
| | | KFCKDIPGFI PSLLGHLLEE RQKIKTKMKE TQDPIEKILL |
| | | DYRQKAIKLL ANSFYGYYGY AKARWYCKEC AESVTAWGRK |
| | | YIELVWKELE EKFGFKVLYI DTDGLYATIP GGESEEIKKK |
| | | ALEFVKYINS KLPGLLELEY EGFYKRGFFV TKKRYAVIDE |
| | | EGKVITRGLE IVRRDWSEIA KETQARVLET ILKHGDVEEA |
| | | VRIVKEVIQK LANYEIPPEK LAIYEQITRP LHEYKAIGPH |
| | | VAVAKKLAAK GVKIKPGMVI GYIVLRGDGP ISNRAILAEE |
| | | YDPKKHKYDA EYYIENQVLP AVLRILEGFG YRKEDLRYQK |
| | | TXQVGLTSWL NIKKSGTGGG GATVKFKYKG EEKEVDISKI |
| | | KKVWRVGKMI SFTYDEGGGK TGRGAVSEKD APKELLQMLE |
| | | KQKK; |
| | | wherein X¹ is any amino acid other than P; in |
| | | some embodiments, X¹ is selected from Q, N, |
| | | H, S, T, Y, C, M, W, A, I, L, F, V, G; in |
| | | some embodiments, X¹ is H; and |
| | | wherein X² is selected from Q, N, H, S, T, Y, |
| | | C, M, W, A, I, L, F, V, P, and G; in some |
| | | embodiments, X² is selected from Q and N. |
| 132 | Pfu GenBank | MILDVDYITE EGKPVIRLFK KENGKFKIEH DRTFRX¹YIYA |
| | WP_011011325.1 P36X¹ | LLRDDSKIEE VKKITGERHG KIVRIVDVEK VEKKFLGKPI |
| | R762Q with DNA binding | TVWKLYLEHP QDVPTIREKV REHPAVVDIF EYDIPFAKRY |
| | domain amino acid sequence | LIDKGLIPME GEEELKILAF DIETLYHEGE EFGKGPIIMI |
| | | SYADENEAKV ITWKNIDLPY VEVVSSEREM IKRFLRIIRE |
| | | KDPDIIVTYN GDSFDFPYLA KRAEKLGIKL TIGRDGSEPK |
| | | MQRIGDMTAV EVKGRIHFDL YHVITRTINL PTYTLEAVYE |
| | | AIFGKPKEKV YADEIAKAWE SGENLERVAK YSMEDAKATY |
| | | ELGKEFLPME IQLSRLVGQP LWDVSRSSTG NLVEWFLLRK |
| | | AYERNEVAPN KPSEEEYQRR LRESYTGGFV KEPEKGLWEN |
| | | IVYLDFRALY PSIIITHNVS PDTLNLEGCK NYDIAPQVGH |
| | | KFCKDIPGFI PSLLGHLLEE RQKIKTKMKE TQDPIEKILL |
| | | DYRQKAIKLL ANSFYGYYGY AKARWYCKEC AESVTAWGRK |
| | | YIELVWKELE EKFGFKVLYI DTDGLYATIP GGESEEIKKK |
| | | ALEFVKYINS KLPGLLELEY EGFYKRGFFV TKKRYAVIDE |
| | | EGKVITRGLE IVRRDWSEIA KETQARVLET ILKHGDVEEA |
| | | VRIVKEVIQK LANYEIPPEK LAIYEQITRP LHEYKAIGPH |
| | | VAVAKKLAAK GVKIKPGMVI GYIVLRGDGP ISNRAILAEE |
| | | YDPKKHKYDA EYYIENQVLP AVLRILEGFG YRKEDLRYQK |
| | | TQQVGLTSWL NIKKSGTGGG GATVKFKYKG EEKEVDISKI |
| | | KKVWRVGKMI SFTYDEGGGK TGRGAVSEKD APKELLQMLE |
| | | KQKK; |
| | | wherein X¹ is any amino acid other than P; in |
| | | some embodiments, X¹ is selected from Q, N, |
| | | H, S, T, Y, C, M, W, A, I, L, F, V, G; in |
| | | some embodiments, X¹ is H. |
| 133 | Pfu GenBank | MILDVDYITE EGKPVIRLFK KENGKFKIEH DRTFRX¹YIYA |
| | WP_011011325.1 P36X¹ | LLRDDSKIEE VKKITGERHG KIVRIVDVEK VEKKFLGKPI |
| | A408S R762X² with DNA | TVWKLYLEHP QDVPTIREKV REHPAVVDIF EYDIPFAKRY |
| | binding domain amino acid | LIDKGLIPME GEEELKILAF DIETLYHEGE EFGKGPIIMI |
| | sequence | SYADENEAKV ITWKNIDLPY VEVVSSEREM IKRFLRIIRE |
| | | KDPDIIVTYN GDSFDFPYLA KRAEKLGIKL TIGRDGSEPK |
| | | MQRIGDMTAV EVKGRIHFDL YHVITRTINL PTYTLEAVYE |
| | | AIFGKPKEKV YADEIAKAWE SGENLERVAK YSMEDAKATY |
| | | ELGKEFLPME IQLSRLVGQP LWDVSRSSTG NLVEWFLLRK |
| | | AYERNEVAPN KPSEEEYQRR LRESYTGGFV KEPEKGLWEN |
| | | IVYLDFRSLY PSIIITHNVS PDTLNLEGCK NYDIAPQVGH |
| | | KFCKDIPGFI PSLLGHLLEE RQKIKTKMKE TQDPIEKILL |
| | | DYRQKAIKLL ANSFYGYYGY AKARWYCKEC AESVTAWGRK |
| | | YIELVWKELE EKFGFKVLYI DTDGLYATIP GGESEEIKKK |
| | | ALEFVKYINS KLPGLLELEY EGFYKRGFFV TKKRYAVIDE |
| | | EGKVITRGLE IVRRDWSEIA KETQARVLET ILKHGDVEEA |
| | | VRIVKEVIQK LANYEIPPEK LAIYEQITRP LHEYKAIGPH |
| | | VAVAKKLAAK GVKIKPGMVI GYIVLRGDGP ISNRAILAEE |
| | | YDPKKHKYDA EYYIENQVLP AVLRILEGFG YRKEDLRYQK |
| | | TXQVGLTSWL NIKKSGTGGG GATVKFKYKG EEKEVDISKI |
| | | KKVWRVGKMI SFTYDEGGGK TGRGAVSEKD APKELLQMLE |
| | | KQKK; |
| | | wherein X¹ is any amino acid other than P; in |
| | | some embodiments, X¹ is selected from Q, N, |
| | | H, S, T, Y, C, M, W, A, I, L, F, V, G; in |
| | | some embodiments, X¹ is H; and |
| | | wherein X² is selected from Q, N, H, S, T, Y, |
| | | C, M, W, A, I, L, F, V, P, and G; in some |
| | | embodiments, X² is selected from Q and N. |
| 134 | Pfu GenBank | MILDVDYITE EGKPVIRLFK KENGKFKIEH DRTFRX¹YIYA |
| | WP_011011325.1 P36X¹ | LLRDDSKIEE VKKITGERHG KIVRIVDVEK VEKKFLGKPI |
| | A408S R762Q with DNA | TVWKLYLEHP QDVPTIREKV REHPAVVDIF EYDIPFAKRY |
| | binding domain amino acid | LIDKGLIPME GEEELKILAF DIETLYHEGE EFGKGPIIMI |
| | sequence | SYADENEAKV ITWKNIDLPY VEVVSSEREM IKRFLRIIRE |
| | | KDPDIIVTYN GDSFDFPYLA KRAEKLGIKL TIGRDGSEPK |
| | | MQRIGDMTAV EVKGRIHFDL YHVITRTINL PTYTLEAVYE |
| | | AIFGKPKEKV YADEIAKAWE SGENLERVAK YSMEDAKATY |
| | | ELGKEFLPME IQLSRLVGQP LWDVSRSSTG NLVEWFLLRK |
| | | AYERNEVAPN KPSEEEYQRR LRESYTGGFV KEPEKGLWEN |
| | | IVYLDFRSLY PSIIITHNVS PDTLNLEGCK NYDIAPQVGH |
| | | KFCKDIPGFI PSLLGHLLEE RQKIKTKMKE TQDPIEKILL |
| | | DYRQKAIKLL ANSFYGYYGY AKARWYCKEC AESVTAWGRK |
| | | YIELVWKELE EKFGFKVLYI DTDGLYATIP GGESEEIKKK |
| | | ALEFVKYINS KLPGLLELEY EGFYKRGFFV TKKRYAVIDE |
| | | EGKVITRGLE IVRRDWSEIA KETQARVLET ILKHGDVEEA |
| | | VRIVKEVIQK LANYEIPPEK LAIYEQITRP LHEYKAIGPH |
| | | VAVAKKLAAK GVKIKPGMVI GYIVLRGDGP ISNRAILAEE |
| | | YDPKKHKYDA EYYIENQVLP AVLRILEGFG YRKEDLRYQK |
| | | TQQVGLTSWL NIKKSGTGGG GATVKFKYKG EEKEVDISKI |
| | | KKVWRVGKMI SFTYDEGGGK TGRGAVSEKD APKELLQMLE |
| | | KQKK; |
| | | wherein X¹ is any amino acid other than P; in |
| | | some embodiments, X¹ is selected from Q, N, |
| | | H, S, T, Y, C, M, W, A, I, L, F, V, G; in |
| | | some embodiments, X¹ is H. |
| 135 | Pyrococcus DNA polymerase | MILDADYITE EGKPVIRLFK KENGEFKIEH DRTFRX¹YIYA |
| | sequence including | LLKDDSKIEE VKKITAERHG KIVRIVDAEK VEKKFLGRPI |
| | exonuclease domain and | TVWRLYFEHP QDVPTIREKI REHSAVVDIF EYDIPFAKRY |
| | catalytic domain, P36X¹ | LIDKGLIPME GDEELKLLAF DIETLYHEGE EFGKGPIIMI |
| | K762X² | SYADEEEAKV ITWKKIDLPY VEVVSSEREM IKRFLKIIRE |
| | | KDPDIIITYN GDSFDLPYLA KRAEKLGIKL TIGRDGSEPK |
| | | MQRIGDMTAV EVKGRIHFDL YHVIRRTINL PTYTLEAVYE |
| | | AIFGKPKEKV YADEIAKAWE TGEGLERVAK YSMEDAKATY |
| | | ELGKEFFPME AQLSRLVGQP LWDVSRSSTG NLVEWFLLRK |
| | | AYERNELAPN KPDEREYERR LRESYAGGFV KEPEKGLWEN |
| | | IVSLDFRALY PSIIITHNVS PDTLNREGCR NYDVAPEVGH |
| | | KFCKDFPGFI PSLLKRLLDE RQKIKTKMKA SQDPIEKIML |
| | | DYRQRAIKIL ANSYYGYYGY AKARWYCKEC AESVTAWGRE |
| | | YIEFVWKELE EKFGFKVLYI DTDGLYATIP GGKSEEIKKK |
| | | ALEFVDYINA KLPGLLELEY EGFYKRGFFV TKKKYALIDE |
| | | EGKIITRGLE IVRRDWSEIA KETQARVLEA ILKHGNVEEA |
| | | VRIVKEVTQK LSKYEIPPEK LAIYEQITRP LHEYKAIGPH |
| | | VAVAKRLAAK GVKIKPGMVI GYIVLRGDGP ISNRAILAEE |
| | | YDPRKHKYDA EYYIENQVLP AVLRILEGFG YRKEDLRWQK |
| | | TXQTGL; |
| | | wherein X¹ is any amino acid other than P; in |
| | | some embodiments, X¹ is selected from Q, N, |
| | | H, S, T, Y, C, M, W, A, I, L, F, V, G; in |
| | | some embodiments, X¹ is H; and |
| | | wherein X² is selected from Q, N, H, S, T, Y, |
| | | C, M, W, A, I, L, F, V, P, and G; in some |
| | | embodiments, X² is selected from Q and N. |
| 136 | Pyrococcus DNA polymerase | MILDADYITE EGKPVIRLFK KENGEFKIEH DRTFRX¹YIYA |
| | sequence including | LLKDDSKIEE VKKITAERHG KIVRIVDAEK VEKKFLGRPI |
| | exonuclease domain and | TVWRLYFEHP QDVPTIREKI REHSAVVDIF EYDIPFAKRY |
| | catalytic domain, P36X¹ | LIDKGLIPME GDEELKLLAF DIETLYHEGE EFGKGPIIMI |
| | A408S K762X² | SYADEEEAKV ITWKKIDLPY VEVVSSEREM IKRFLKIIRE |
| | | KDPDIIITYN GDSFDLPYLA KRAEKLGIKL TIGRDGSEPK |
| | | MQRIGDMTAV EVKGRIHFDL YHVIRRTINL PTYTLEAVYE |
| | | AIFGKPKEKV YADEIAKAWE TGEGLERVAK YSMEDAKATY |
| | | ELGKEFFPME AQLSRLVGQP LWDVSRSSTG NLVEWFLLRK |
| | | AYERNELAPN KPDEREYERR LRESYAGGFV KEPEKGLWEN |
| | | IVSLDFRSLY PSIIITHNVS PDTLNREGCR NYDVAPEVGH |
| | | KFCKDFPGFI PSLLKRLLDE RQKIKTKMKA SQDPIEKIML |
| | | DYRQRAIKIL ANSYYGYYGY AKARWYCKEC AESVTAWGRE |
| | | YIEFVWKELE EKFGFKVLYI DTDGLYATIP GGKSEEIKKK |
| | | ALEFVDYINA KLPGLLELEY EGFYKRGFFV TKKKYALIDE |
| | | EGKIITRGLE IVRRDWSEIA KETQARVLEA ILKHGNVEEA |
| | | VRIVKEVTQK LSKYEIPPEK LAIYEQITRP LHEYKAIGPH |
| | | VAVAKRLAAK GVKIKPGMVI GYIVLRGDGP ISNRAILAEE |
| | | YDPRKHKYDA EYYIENQVLP AVLRILEGFG YRKEDLRWQK |
| | | TXQTGL; |
| | | wherein X¹ is any amino acid other than P; in |
| | | some embodiments, X¹ is selected from Q, N, |
| | | H, S, T, Y, C, M, W, A, I, L, F, V, G; in |
| | | some embodiments, X¹ is H; and |
| | | wherein X² is selected from Q, N, H, S, T, Y, |
| | | C, M, W, A, I, L, F, V, P, and G; in some |
| | | embodiments, X² is selected from Q and N. |
| 137 | Pyrococcus DNA polymerase | MILDADYITE EGKPVIRLFK KENGEFKIEH DRTFRX¹YIYA |
| | sequence including | LLKDDSKIEE VKKITAERHG KIVRIVDAEK VEKKFLGRPI |
| | exonuclease domain and | TVWRLYFEHP QDVPTIREKI REHSAVVDIF EYDIPFAKRY |
| | catalytic domain, P36X¹ | LIDKGLIPME GDEELKLLAF DIETLYHEGE EFGKGPIIMI |
| | K762Q | SYADEEEAKV ITWKKIDLPY VEVVSSEREM IKRFLKIIRE |
| | | KDPDIIITYN GDSFDLPYLA KRAEKLGIKL TIGRDGSEPK |
| | | MQRIGDMTAV EVKGRIHFDL YHVIRRTINL PTYTLEAVYE |
| | | AIFGKPKEKV YADEIAKAWE TGEGLERVAK YSMEDAKATY |
| | | ELGKEFFPME AQLSRLVGQP LWDVSRSSTG NLVEWFLLRK |
| | | AYERNELAPN KPDEREYERR LRESYAGGFV KEPEKGLWEN |
| | | IVSLDFRALY PSIIITHNVS PDTLNREGCR NYDVAPEVGH |
| | | KFCKDFPGFI PSLLKRLLDE RQKIKTKMKA SQDPIEKIML |
| | | DYRQRAIKIL ANSYYGYYGY AKARWYCKEC AESVTAWGRE |
| | | YIEFVWKELE EKFGFKVLYI DTDGLYATIP GGKSEEIKKK |
| | | ALEFVDYINA KLPGLLELEY EGFYKRGFFV TKKKYALIDE |
| | | EGKIITRGLE IVRRDWSEIA KETQARVLEA ILKHGNVEEA |
| | | VRIVKEVTQK LSKYEIPPEK LAIYEQITRP LHEYKAIGPH |
| | | VAVAKRLAAK GVKIKPGMVI GYIVLRGDGP ISNRAILAEE |
| | | YDPRKHKYDA EYYIENQVLP AVLRILEGFG YRKEDLRWQK |
| | | TQQTGL; |
| | | wherein X¹ is any amino acid other than P; in |
| | | some embodiments, X¹ is selected from Q, N, |
| | | H, S, T, Y, C, M, W, A, I, L, F, V, G; in |
| | | some embodiments, X¹ is H. |
| 138 | Pyrococcus DNA polymerase | MILDADYITE EGKPVIRLFK KENGEFKIEH DRTFRX¹YIYA |
| | sequence including | LLKDDSKIEE VKKITAERHG KIVRIVDAEK VEKKFLGRPI |
| | exonuclease domain and | TVWRLYFEHP QDVPTIREKI REHSAVVDIF EYDIPFAKRY |
| | catalytic domain, P36X¹ | LIDKGLIPME GDEELKLLAF DIETLYHEGE EFGKGPIIMI |
| | A408S K762Q | SYADEEEAKV ITWKKIDLPY VEVVSSEREM IKRFLKIIRE |
| | | KDPDIIITYN GDSFDLPYLA KRAEKLGIKL TIGRDGSEPK |
| | | MQRIGDMTAV EVKGRIHFDL YHVIRRTINL PTYTLEAVYE |
| | | AIFGKPKEKV YADEIAKAWE TGEGLERVAK YSMEDAKATY |
| | | ELGKEFFPME AQLSRLVGQP LWDVSRSSTG NLVEWFLLRK |
| | | AYERNELAPN KPDEREYERR LRESYAGGFV KEPEKGLWEN |
| | | IVSLDFRSLY PSIIITHNVS PDTLNREGCR NYDVAPEVGH |
| | | KFCKDFPGFI PSLLKRLLDE RQKIKTKMKA SQDPIEKIML |
| | | DYRQRAIKIL ANSYYGYYGY AKARWYCKEC AESVTAWGRE |
| | | YIEFVWKELE EKFGFKVLYI DTDGLYATIP GGKSEEIKKK |
| | | ALEFVDYINA KLPGLLELEY EGFYKRGFFV TKKKYALIDE |
| | | EGKIITRGLE IVRRDWSEIA KETQARVLEA ILKHGNVEEA |
| | | VRIVKEVTQK LSKYEIPPEK LAIYEQITRP LHEYKAIGPH |
| | | VAVAKRLAAK GVKIKPGMVI GYIVLRGDGP ISNRAILAEE |
| | | YDPRKHKYDA EYYIENQVLP AVLRILEGFG YRKEDLRWQK |
| | | TQQTGL; |
| | | wherein X¹ is any amino acid other than P; in |
| | | some embodiments, X¹ is selected from Q, N, |
| | | H, S, T, Y, C, M, W, A, I, L, F, V, G; in |
| | | some embodiments, X¹ is H. |
| 139 | Pyrococcus DNA polymerase | MILDADYITE EGKPVIRLFK KENGEFKIEH DRTFRX¹YIYA |
| | sequence including | LLKDDSKIEE VKKITAERHG KIVRIVDAEK VEKKFLGRPI |
| | exonuclease domain and DNA | TVWRLYFEHP QDVPTIREKI REHSAVVDIF EYDIPFAKRY |
| | binding domain, P36X¹ | LIDKGLIPME GDEELKLLAF DIETLYHEGE EFGKGPIIMI |
| | K762X² | SYADEEEAKV ITWKKIDLPY VEVVSSEREM IKRFLKIIRE |
| | | KDPDIIITYN GDSFDLPYLA KRAEKLGIKL TIGRDGSEPK |
| | | MQRIGDMTAV EVKGRIHFDL YHVIRRTINL PTYTLEAVYE |
| | | AIFGKPKEKV YADEIAKAWE TGEGLERVAK YSMEDAKATY |
| | | ELGKEFFPME AQLSRLVGQP LWDVSRSSTG NLVEWFLLRK |
| | | AYERNELAPN KPDEREYERR LRESYAGGFV KEPEKGLWEN |
| | | IVSLDFRALY PSIIITHNVS PDTLNREGCR NYDVAPEVGH |
| | | KFCKDFPGFI PSLLKRLLDE RQKIKTKMKA SQDPIEKIML |
| | | DYRQRAIKIL ANSYYGYYGY AKARWYCKEC AESVTAWGRE |
| | | YIEFVWKELE EKFGFKVLYI DTDGLYATIP GGKSEEIKKK |
| | | ALEFVDYINA KLPGLLELEY EGFYKRGFFV TKKKYALIDE |
| | | EGKIITRGLE IVRRDWSEIA KETQARVLEA ILKHGNVEEA |
| | | VRIVKEVTQK LSKYEIPPEK LAIYEQITRP LHEYKAIGPH |
| | | VAVAKRLAAK GVKIKPGMVI GYIVLRGDGP ISNRAILAEE |
| | | YDPRKHKYDA EYYIENQVLP AVLRILEGFG YRKEDLRWQK |
| | | TXQTGLTSWL NIKKSGTGGG GATVKFKYKG EEKEVDISKI |
| | | KKVWRVGKMI SFTYDEGGGK TGRGAVSEKD APKELLQMLE |
| | | KQKK; |
| | | wherein X¹ is any amino acid other than P; in |
| | | some embodiments, X¹ is selected from Q, N, |
| | | H, S, T, Y, C, M, W, A, I, L, F, V, G; in |
| | | some embodiments, X¹ is H; |
| | | wherein X² is selected from Q, N, H, S, T, Y, |
| | | C, M, W, A, I, L, F, V, P, and G; in some |
| | | embodiments, X² is selected from Q and N. |
| 140 | Pyrococcus DNA polymerase | MILDADYITE EGKPVIRLFK KENGEFKIEH DRTFRX¹YIYA |
| | sequence including | LLKDDSKIEE VKKITAERHG KIVRIVDAEK VEKKFLGRPI |
| | exonuclease domain and DNA | TVWRLYFEHP QDVPTIREKI REHSAVVDIF EYDIPFAKRY |
| | binding domain, P36X¹ K762Q | LIDKGLIPME GDEELKLLAF DIETLYHEGE EFGKGPIIMI |
| | | SYADEEEAKV ITWKKIDLPY VEVVSSEREM IKRFLKIIRE |
| | | KDPDIIITYN GDSFDLPYLA KRAEKLGIKL TIGRDGSEPK |
| | | MQRIGDMTAV EVKGRIHFDL YHVIRRTINL PTYTLEAVYE |
| | | AIFGKPKEKV YADEIAKAWE TGEGLERVAK YSMEDAKATY |
| | | ELGKEFFPME AQLSRLVGQP LWDVSRSSTG NLVEWFLLRK |
| | | AYERNELAPN KPDEREYERR LRESYAGGFV KEPEKGLWEN |
| | | IVSLDFRALY PSIIITHNVS PDTLNREGCR NYDVAPEVGH |
| | | KFCKDFPGFI PSLLKRLLDE RQKIKTKMKA SQDPIEKIML |
| | | DYRQRAIKIL ANSYYGYYGY AKARWYCKEC AESVTAWGRE |
| | | YIEFVWKELE EKFGFKVLYI DTDGLYATIP GGKSEEIKKK |
| | | ALEFVDYINA KLPGLLELEY EGFYKRGFFV TKKKYALIDE |
| | | EGKIITRGLE IVRRDWSEIA KETQARVLEA ILKHGNVEEA |
| | | VRIVKEVTQK LSKYEIPPEK LAIYEQITRP LHEYKAIGPH |
| | | VAVAKRLAAK GVKIKPGMVI GYIVLRGDGP ISNRAILAEE |
| | | YDPRKHKYDA EYYIENQVLP AVLRILEGFG YRKEDLRWQK |
| | | TQQTGLTSWL NIKKSGTGGG GATVKFKYKG EEKEVDISKI |
| | | KKVWRVGKMI SFTYDEGGGK TGRGAVSEKD APKELLQMLE |
| | | KQKK; |
| | | wherein X¹ is any amino acid other than P; in |
| | | some embodiments, X¹ is selected from Q, N, |
| | | H, S, T, Y, C, M, W, A, I, L, F, V, G; in |
| | | some embodiments, X¹ is H. |
| 141 | Pyrococcus DNA polymerase | MILDADYITE EGKPVIRLFK KENGEFKIEH DRTFRX¹YIYA |
| | sequence including | LLKDDSKIEE VKKITAERHG KIVRIVDAEK VEKKFLGRPI |
| | exonuclease domain and DNA | TVWRLYFEHP QDVPTIREKI REHSAVVDIF EYDIPFAKRY |
| | binding domain, P36X¹ A408S | LIDKGLIPME GDEELKLLAF DIETLYHEGE EFGKGPIIMI |
| | K762X² | SYADEEEAKV ITWKKIDLPY VEVVSSEREM IKRFLKIIRE |
| | | KDPDIIITYN GDSFDLPYLA KRAEKLGIKL TIGRDGSEPK |
| | | MQRIGDMTAV EVKGRIHFDL YHVIRRTINL PTYTLEAVYE |
| | | AIFGKPKEKV YADEIAKAWE TGEGLERVAK YSMEDAKATY |
| | | ELGKEFFPME AQLSRLVGQP LWDVSRSSTG NLVEWFLLRK |
| | | AYERNELAPN KPDEREYERR LRESYAGGFV KEPEKGLWEN |
| | | IVSLDFRSLY PSIIITHNVS PDTLNREGCR NYDVAPEVGH |
| | | KFCKDFPGFI PSLLKRLLDE RQKIKTKMKA SQDPIEKIML |
| | | DYRQRAIKIL ANSYYGYYGY AKARWYCKEC AESVTAWGRE |
| | | YIEFVWKELE EKFGFKVLYI DTDGLYATIP GGKSEEIKKK |
| | | ALEFVDYINA KLPGLLELEY EGFYKRGFFV TKKKYALIDE |
| | | EGKIITRGLE IVRRDWSEIA KETQARVLEA ILKHGNVEEA |
| | | VRIVKEVTQK LSKYEIPPEK LAIYEQITRP LHEYKAIGPH |
| | | VAVAKRLAAK GVKIKPGMVI GYIVLRGDGP ISNRAILAEE |
| | | YDPRKHKYDA EYYIENQVLP AVLRILEGFG YRKEDLRWQK |
| | | TXQTGLTSWL NIKKSGTGGG GATVKFKYKG EEKEVDISKI |
| | | KKVWRVGKMI SFTYDEGGGK TGRGAVSEKD APKELLQMLE |
| | | KQKK; |
| | | wherein X¹ is any amino acid other than P; in |
| | | some embodiments, X¹ is selected from Q, N, |
| | | H, S, T, Y, C, M, W, A, I, L, F, V, G; in |
| | | some embodiments, X¹ is H; and |
| | | wherein X² is selected from Q, N, H, S, T, Y, |
| | | C, M, W, A, I, L, F, V, P, and G; in some |
| | | embodiments, X² is selected from Q and N. |
| 142 | Pyrococcus DNA polymerase | MILDADYITE EGKPVIRLFK KENGEFKIEH DRTFRX¹YIYA |
| | sequence including | LLKDDSKIEE VKKITAERHG KIVRIVDAEK VEKKFLGRPI |
| | exonuclease domain and | TVWRLYFEHP QDVPTIREKI REHSAVVDIF EYDIPFAKRY |
| | sequence non-specific DNA | LIDKGLIPME GDEELKLLAF DIETLYHEGE EFGKGPIIMI |
| | binding domain, P36X¹ A408S | SYADEEEAKV ITWKKIDLPY VEVVSSEREM IKRFLKIIRE |
| | K762Q | KDPDIIITYN GDSFDLPYLA KRAEKLGIKL TIGRDGSEPK |
| | | MQRIGDMTAV EVKGRIHFDL YHVIRRTINL PTYTLEAVYE |
| | | AIFGKPKEKV YADEIAKAWE TGEGLERVAK YSMEDAKATY |
| | | ELGKEFFPME AQLSRLVGQP LWDVSRSSTG NLVEWFLLRK |
| | | AYERNELAPN KPDEREYERR LRESYAGGFV KEPEKGLWEN |
| | | IVSLDFRSLY PSIIITHNVS PDTLNREGCR NYDVAPEVGH |
| | | KFCKDFPGFI PSLLKRLLDE RQKIKTKMKA SQDPIEKIML |
| | | DYRQRAIKIL ANSYYGYYGY AKARWYCKEC AESVTAWGRE |
| | | YIEFVWKELE EKFGFKVLYI DTDGLYATIP GGKSEEIKKK |
| | | ALEFVDYINA KLPGLLELEY EGFYKRGFFV TKKKYALIDE |
| | | EGKIITRGLE IVRRDWSEIA KETQARVLEA ILKHGNVEEA |
| | | VRIVKEVTQK LSKYEIPPEK LAIYEQITRP LHEYKAIGPH |
| | | VAVAKRLAAK GVKIKPGMVI GYIVLRGDGP ISNRAILAEE |
| | | YDPRKHKYDA EYYIENQVLP AVLRILEGFG YRKEDLRWQK |
| | | TQQTGLTSWL NIKKSGTGGG GATVKFKYKG EEKEVDISKI |
| | | KKVWRVGKMI SFTYDEGGGK TGRGAVSEKD APKELLQMLE |
| | | KQKK; |
| | | wherein X¹ is any amino acid other than P; in |
| | | some embodiments, X¹ is selected from Q, N, |
| | | H, S, T, Y, C, M, W, A, I, L, F, V, G; in |
| | | some embodiments, X¹ is H. |
| 143 | P36X¹ K762X² variant of Deep | MILDADYITE DGKPIIRIFK KENGEFKVEY DRNFRX¹YIYA |
| | Vent DNA polymerase amino | LLKDDSQIDE VRKITAERHG KIVRIIDAEK VRKKFLGRPI |
| | acid sequence | EVWRLYFEHP QDVPAIRDKI REHSAVIDIF EYDIPFAKRY |
| | | LIDKGLIPME GDEELKLLAF DIETLYHEGE EFAKGPIIMI |
| | | SYADEEEAKV ITWKKIDLPY VEVVSSEREM IKRFLKVIRE |
| | | KDPDVIITYN GDSFDLPYLV KRAEKLGIKL PLGRDGSEPK |
| | | MQRLGDMTAV EIKGRIHFDL YHVIRRTINL PTYTLEAVYE |
| | | AIFGKPKEKV YAHEIAEAWE TGKGLERVAK YSMEDAKVTY |
| | | ELGREFFPME AQLSRLVGQP LWDVSRSSTG NLVEWYLLRK |
| | | AYERNELAPN KPDEREYERR LRESYAGGYV KEPEKGLWEG |
| | | LVSLDFRSLY PSIIITHNVS PDTLNREGCR EYDVAPEVGH |
| | | KFCKDFPGFI PSLLKRLLDE RQEIKRKMKA SKDPIEKKML |
| | | DYRQRAIKIL ANSYYGYYGY AKARWYCKEC AESVTAWGRE |
| | | YIEFVRKELE EKFGFKVLYI DTDGLYATIP GAKPEEIKKK |
| | | ALEFVDYINA KLPGLLELEY EGFYVRGFFV TKKKYALIDE |
| | | EGKIITRGLE IVRRDWSEIA KETQAKVLEA ILKHGNVEEA |
| | | VKIVKEVTEK LSKYEIPPEK LVIYEQITRP LHEYKAIGPH |
| | | VAVAKRLAAR GVKVRPGMVI GYIVLRGDGP ISKRAILAEE |
| | | FDLRKHKYDA EYYIENQVLP AVLRILEAFG YRKEDLRWQK |
| | | TXQTGLTAWL NIKKK; |
| | | wherein X¹ is any amino acid other than P; in |
| | | some embodiments, X¹ is selected from Q, N, |
| | | H, S, T, Y, C, M, W, A, I, L, F, V, G; in |
| | | some embodiments, X¹ is H; and |
| | | wherein X² is selected from Q, N, H, S, T, Y, |
| | | C, M, W, A, I, L, F, V, P, and G; in some |
| | | embodiments, X² is selected from Q and N. |
| 144 | P36X¹ K762Q variant of Deep | MILDADYITE DGKPIIRIFK KENGEFKVEY DRNFRX¹YIYA |
| | Vent DNA polymerase amino | LLKDDSQIDE VRKITAERHG KIVRIIDAEK VRKKFLGRPI |
| | acid sequence | EVWRLYFEHP QDVPAIRDKI REHSAVIDIF EYDIPFAKRY |
| | | LIDKGLIPME GDEELKLLAF DIETLYHEGE EFAKGPIIMI |
| | | SYADEEEAKV ITWKKIDLPY VEVVSSEREM IKRFLKVIRE |
| | | KDPDVIITYN GDSFDLPYLV KRAEKLGIKL PLGRDGSEPK |
| | | MQRLGDMTAV EIKGRIHFDL YHVIRRTINL PTYTLEAVYE |
| | | AIFGKPKEKV YAHEIAEAWE TGKGLERVAK YSMEDAKVTY |
| | | ELGREFFPME AQLSRLVGQP LWDVSRSSTG NLVEWYLLRK |
| | | AYERNELAPN KPDEREYERR LRESYAGGYV KEPEKGLWEG |
| | | LVSLDFRSLY PSIIITHNVS PDTLNREGCR EYDVAPEVGH |
| | | KFCKDFPGFI PSLLKRLLDE RQEIKRKMKA SKDPIEKKML |
| | | DYRQRAIKIL ANSYYGYYGY AKARWYCKEC AESVTAWGRE |
| | | YIEFVRKELE EKFGFKVLYI DTDGLYATIP GAKPEEIKKK |
| | | ALEFVDYINA KLPGLLELEY EGFYVRGFFV TKKKYALIDE |
| | | EGKIITRGLE IVRRDWSEIA KETQAKVLEA ILKHGNVEEA |
| | | VKIVKEVTEK LSKYEIPPEK LVIYEQITRP LHEYKAIGPH |
| | | VAVAKRLAAR GVKVRPGMVI GYIVLRGDGP ISKRAILAEE |
| | | FDLRKHKYDA EYYIENQVLP AVLRILEAFG YRKEDLRWQK |
| | | TQQTGLTAWL NIKKK; |
| | | wherein X¹ is any amino acid other than P; in |
| | | some embodiments, X¹ is selected from Q, N, |
| | | H, S, T, Y, C, M, W, A, I, L, F, V, G; in |
| | | some embodiments, X¹ is H. |
| 145 | P36X¹ K762X² variant of Deep | MILDADYITE DGKPIIRIFK KENGEFKVEY DRNFRX¹YIYA |
| | Vent DNA polymerase amino | LLKDDSQIDE VRKITAERHG KIVRIIDAEK VRKKFLGRPI |
| | acid sequence with DNA | EVWRLYFEHP QDVPAIRDKI REHSAVIDIF EYDIPFAKRY |
| | binding domain | LIDKGLIPME GDEELKLLAF DIETLYHEGE EFAKGPIIMI |
| | | SYADEEEAKV ITWKKIDLPY VEVVSSEREM IKRFLKVIRE |
| | | KDPDVIITYN GDSFDLPYLV KRAEKLGIKL PLGRDGSEPK |
| | | MQRLGDMTAV EIKGRIHFDL YHVIRRTINL PTYTLEAVYE |
| | | AIFGKPKEKV YAHEIAEAWE TGKGLERVAK YSMEDAKVTY |
| | | ELGREFFPME AQLSRLVGQP LWDVSRSSTG NLVEWYLLRK |
| | | AYERNELAPN KPDEREYERR LRESYAGGYV KEPEKGLWEG |
| | | LVSLDFRSLY PSIIITHNVS PDTLNREGCR EYDVAPEVGH |
| | | KFCKDFPGFI PSLLKRLLDE RQEIKRKMKA SKDPIEKKML |
| | | DYRQRAIKIL ANSYYGYYGY AKARWYCKEC AESVTAWGRE |
| | | YIEFVRKELE EKFGFKVLYI DTDGLYATIP GAKPEEIKKK |
| | | ALEFVDYINA KLPGLLELEY EGFYVRGFFV TKKKYALIDE |
| | | EGKIITRGLE IVRRDWSEIA KETQAKVLEA ILKHGNVEEA |
| | | VKIVKEVTEK LSKYEIPPEK LVIYEQITRP LHEYKAIGPH |
| | | VAVAKRLAAR GVKVRPGMVI GYIVLRGDGP ISKRAILAEE |
| | | FDLRKHKYDA EYYIENQVLP AVLRILEAFG YRKEDLRWQK |
| | | TXQTGLTAWL NIKKKGTGGG GATVKFKYKG EEKEVDISKI |
| | | KKVWRVGKMI SFTYDEGGGK TGRGAVSEKD APKELLQMLE |
| | | KQKK; |
| | | wherein X¹ is any amino acid other than P; in |
| | | some embodiments, X¹ is selected from Q, N, |
| | | H, S, T, Y, C, M, W, A, I, L, F, V, G; in |
| | | some embodiments, X¹ is H; and |
| | | wherein X² is selected from Q, N, H, S, T, Y, |
| | | C, M, W, A, I, L, F, V, P, and G; in some |
| | | embodiments, X² is selected from Q and N. |
| 146 | P36X¹ K762Q variant of Deep | MILDADYITE DGKPIIRIFK KENGEFKVEY DRNFRX¹YIYA |
| | Vent DNA polymerase amino | LLKDDSQIDE VRKITAERHG KIVRIIDAEK VRKKFLGRPI |
| | acid sequence with DNA | EVWRLYFEHP QDVPAIRDKI REHSAVIDIF EYDIPFAKRY |
| | binding domain | LIDKGLIPME GDEELKLLAF DIETLYHEGE EFAKGPIIMI |
| | | SYADEEEAKV ITWKKIDLPY VEVVSSEREM IKRFLKVIRE |
| | | KDPDVIITYN GDSFDLPYLV KRAEKLGIKL PLGRDGSEPK |
| | | MQRLGDMTAV EIKGRIHFDL YHVIRRTINL PTYTLEAVYE |
| | | AIFGKPKEKV YAHEIAEAWE TGKGLERVAK YSMEDAKVTY |
| | | ELGREFFPME AQLSRLVGQP LWDVSRSSTG NLVEWYLLRK |
| | | AYERNELAPN KPDEREYERR LRESYAGGYV KEPEKGLWEG |
| | | LVSLDFRSLY PSIIITHNVS PDTLNREGCR EYDVAPEVGH |
| | | KFCKDFPGFI PSLLKRLLDE RQEIKRKMKA SKDPIEKKML |
| | | DYRQRAIKIL ANSYYGYYGY AKARWYCKEC AESVTAWGRE |
| | | YIEFVRKELE EKFGFKVLYI DTDGLYATIP GAKPEEIKKK |
| | | ALEFVDYINA KLPGLLELEY EGFYVRGFFV TKKKYALIDE |
| | | EGKIITRGLE IVRRDWSEIA KETQAKVLEA ILKHGNVEEA |
| | | VKIVKEVTEK LSKYEIPPEK LVIYEQITRP LHEYKAIGPH |
| | | VAVAKRLAAR GVKVRPGMVI GYIVLRGDGP ISKRAILAEE |
| | | FDLRKHKYDA EYYIENQVLP AVLRILEAFG YRKEDLRWQK |
| | | TQQTGLTAWL NIKKKGTGGG GATVKFKYKG EEKEVDISKI |
| | | KKVWRVGKMI SFTYDEGGGK TGRGAVSEKD APKELLQMLE |
| | | KQKK; |
| | | wherein X¹ is any amino acid other than P; in |
| | | some embodiments, X¹ is selected from Q, N, |
| | | H, S, T, Y, C, M, W, A, I, L, F, V, G; in |
| | | some embodiments, X¹ is H. |
| 147 | P36X¹ K762X² K775S variant | MILDADYITE DGKPIIRIFK KENGEFKVEY DRNFRX¹YIYA |
| | of Deep Vent DNA | LLKDDSQIDE VRKITAERHG KIVRIIDAEK VRKKFLGRPI |
| | polymerase amino acid | EVWRLYFEHP QDVPAIRDKI REHSAVIDIF EYDIPFAKRY |
| | sequence with sequence non- | LIDKGLIPME GDEELKLLAF DIETLYHEGE EFAKGPIIMI |
| | specific DNA binding domain | SYADEEEAKV ITWKKIDLPY VEVVSSEREM IKRFLKVIRE |
| | | KDPDVIITYN GDSFDLPYLV KRAEKLGIKL PLGRDGSEPK |
| | | MQRLGDMTAV EIKGRIHFDL YHVIRRTINL PTYTLEAVYE |
| | | AIFGKPKEKV YAHEIAEAWE TGKGLERVAK YSMEDAKVTY |
| | | ELGREFFPME AQLSRLVGQP LWDVSRSSTG NLVEWYLLRK |
| | | AYERNELAPN KPDEREYERR LRESYAGGYV KEPEKGLWEG |
| | | LVSLDFRSLY PSIIITHNVS PDTLNREGCR EYDVAPEVGH |
| | | KFCKDFPGFI PSLLKRLLDE RQEIKRKMKA SKDPIEKKML |
| | | DYRQRAIKIL ANSYYGYYGY AKARWYCKEC AESVTAWGRE |
| | | YIEFVRKELE EKFGFKVLYI DTDGLYATIP GAKPEEIKKK |
| | | ALEFVDYINA KLPGLLELEY EGFYVRGFFV TKKKYALIDE |
| | | EGKIITRGLE IVRRDWSEIA KETQAKVLEA ILKHGNVEEA |
| | | VKIVKEVTEK LSKYEIPPEK LVIYEQITRP LHEYKAIGPH |
| | | VAVAKRLAAR GVKVRPGMVI GYIVLRGDGP ISKRAILAEE |
| | | FDLRKHKYDA EYYIENQVLP AVLRILEAFG YRKEDLRWQK |
| | | TXQTGLTAWL NIKKSGTGGG GATVKFKYKG EEKEVDISKI |
| | | KKVWRVGKMI SFTYDEGGGK TGRGAVSEKD APKELLQMLE |
| | | KQKK; |
| | | wherein X¹ is any amino acid other than P; in |
| | | some embodiments, X¹ is selected from Q, N, |
| | | H, S, T, Y, C, M, W, A, I, L, F, V, G; in |
| | | some embodiments, X¹ is H; and |
| | | wherein X² is selected from Q, N, H, S, T, Y, |
| | | C, M, W, A, I, L, F, V, P, and G; in some |
| | | embodiments, X² is selected from Q and N. |
| 148 | P36X¹ K762Q K775S variant | MILDADYITE DGKPIIRIFK KENGEFKVEY DRNFRX¹YIYA |
| | of Deep Vent DNA | LLKDDSQIDE VRKITAERHG KIVRIIDAEK VRKKFLGRPI |
| | polymerase amino acid | EVWRLYFEHP QDVPAIRDKI REHSAVIDIF EYDIPFAKRY |
| | sequence with sequence non- | LIDKGLIPME GDEELKLLAF DIETLYHEGE EFAKGPIIMI |
| | specific DNA binding domain | SYADEEEAKV ITWKKIDLPY VEVVSSEREM IKRFLKVIRE |
| | | KDPDVIITYN GDSFDLPYLV KRAEKLGIKL PLGRDGSEPK |
| | | MQRLGDMTAV EIKGRIHFDL YHVIRRTINL PTYTLEAVYE |
| | | AIFGKPKEKV YAHEIAEAWE TGKGLERVAK YSMEDAKVTY |
| | | ELGREFFPME AQLSRLVGQP LWDVSRSSTG NLVEWYLLRK |
| | | AYERNELAPN KPDEREYERR LRESYAGGYV KEPEKGLWEG |
| | | LVSLDFRSLY PSIIITHNVS PDTLNREGCR EYDVAPEVGH |
| | | KFCKDFPGFI PSLLKRLLDE RQEIKRKMKA SKDPIEKKML |
| | | DYRQRAIKIL ANSYYGYYGY AKARWYCKEC AESVTAWGRE |
| | | YIEFVRKELE EKFGFKVLYI DTDGLYATIP GAKPEEIKKK |
| | | ALEFVDYINA KLPGLLELEY EGFYVRGFFV TKKKYALIDE |
| | | EGKIITRGLE IVRRDWSEIA KETQAKVLEA ILKHGNVEEA |
| | | VKIVKEVTEK LSKYEIPPEK LVIYEQITRP LHEYKAIGPH |
| | | VAVAKRLAAR GVKVRPGMVI GYIVLRGDGP ISKRAILAEE |
| | | FDLRKHKYDA EYYIENQVLP AVLRILEAFG YRKEDLRWQK |
| | | TQQTGLTAWL NIKKSGTGGG GATVKFKYKG EEKEVDISKI |
| | | KKVWRVGKMI SFTYDEGGGK TGRGAVSEKD APKELLQMLE |
| | | KQKK; |
| | | wherein X¹ is any amino acid other than P; in |
| | | some embodiments, X¹ is selected from Q, N, |
| | | H, S, T, Y, C, M, W, A, I, L, F, V, G; in |
| | | some embodiments, X¹ is H. |
| 149 | P36X¹ K764X² variant of | MILDTDYITK DGKPIIRIFK KENGEFKIEL DPHFQX¹YIYA |
| | Thermococcus litoralis DNA | LLKDDSAIEE IKAIKGERHG KTVRVLDAVK VRKKFLGREV |
| | polymerase | EVWKLIFEHP QDVPAMRGKI REHPAVVDIY EYDIPFAKRY |
| | | LIDKGLIPME GDEELKLLAF DIETFYHEGD EFGKGEIIMI |
| | | SYADEEEARV ITWKNIDLPY VDVVSNEREM IKRFVQVVKE |
| | | KDPDVIITYN GDNFDLPYLI KRAEKLGVRL VLGRDKEHPE |
| | | PKIQRMGDSF AVEIKGRIHF DLFPVVRRTI NLPTYTLEAV |
| | | YEAVLGKTKS KLGAEEIAAI WETEESMKKL AQYSMEDARA |
| | | TYELGKEFFP MEAELAKLIG QSVWDVSRSS TGNLVEWYLL |
| | | RVAYARNELA PNKPDEEEYK RRLRTTYLGG YVKEPEKGLW |
| | | ENIIYLDFRS LYPSIIVTHN VSPDTLEKEG CKNYDVAPIV |
| | | GYRFCKDFPG FIPSILGDLI AMRQDIKKKM KSTIDPIEKK |
| | | MLDYRQRAIK LLANSYYGYM GYPKARWYSK ECAESVTAWG |
| | | RHYIEMTIRE IEEKFGFKVL YADTDGFYAT IPGEKPELIK |
| | | KKAKEFLNYI NSKLPGLLEL EYEGFYLRGF FVTKKRYAVI |
| | | DEEGRITTRG LEVVRRDWSE IAKETQAKVL EAILKEGSVE |
| | | KAVEVVRDVV EKIAKYRVPL EKLVIHEQIT RDLKDYKAIG |
| | | PHVAIAKRLA ARGIKVKPGT IISYIVLKGS GKISDRVILL |
| | | TEYDPRKHKY DPDYYIENQV LPAVLRILEA FGYRKEDLRY |
| | | QSSXQTGLDA WLKR; |
| | | wherein X¹ is any amino acid other than P; in |
| | | some embodiments, X¹ is selected from Q, N, |
| | | H, S, T, Y, C, M, W, A, I, L, F, V, G; in |
| | | some embodiments, X¹ is H; and |
| | | wherein X² is selected from Q, N, H, S, T, Y, |
| | | C, M, W, A, I, L, F, V, P, and G; in some |
| | | embodiments, X² is selected from Q and N. |
| 150 | P36X¹ K764Q variant of | MILDTDYITK DGKPIIRIFK KENGEFKIEL DPHFQX¹YIYA |
| | Thermococcus litoralis DNA | LLKDDSAIEE IKAIKGERHG KTVRVLDAVK VRKKFLGREV |
| | polymerase | EVWKLIFEHP QDVPAMRGKI REHPAVVDIY EYDIPFAKRY |
| | | LIDKGLIPME GDEELKLLAF DIETFYHEGD EFGKGEIIMI |
| | | SYADEEEARV ITWKNIDLPY VDVVSNEREM IKRFVQVVKE |
| | | KDPDVIITYN GDNFDLPYLI KRAEKLGVRL VLGRDKEHPE |
| | | PKIQRMGDSF AVEIKGRIHF DLFPVVRRTI NLPTYTLEAV |
| | | YEAVLGKTKS KLGAEEIAAI WETEESMKKL AQYSMEDARA |
| | | TYELGKEFFP MEAELAKLIG QSVWDVSRSS TGNLVEWYLL |
| | | RVAYARNELA PNKPDEEEYK RRLRTTYLGG YVKEPEKGLW |
| | | ENIIYLDFRS LYPSIIVTHN VSPDTLEKEG CKNYDVAPIV |
| | | GYRFCKDFPG FIPSILGDLI AMRQDIKKKM KSTIDPIEKK |
| | | MLDYRQRAIK LLANSYYGYM GYPKARWYSK ECAESVTAWG |
| | | RHYIEMTIRE IEEKFGFKVL YADTDGFYAT IPGEKPELIK |
| | | KKAKEFLNYI NSKLPGLLEL EYEGFYLRGF FVTKKRYAVI |
| | | DEEGRITTRG LEVVRRDWSE IAKETQAKVL EAILKEGSVE |
| | | KAVEVVRDVV EKIAKYRVPL EKLVIHEQIT RDLKDYKAIG |
| | | PHVAIAKRLA ARGIKVKPGT IISYIVLKGS GKISDRVILL |
| | | TEYDPRKHKY DPDYYIENQV LPAVLRILEA FGYRKEDLRY |
| | | QSSQQTGLDA WLKR; |
| | | wherein X¹ is any amino acid other than P; in |
| | | some embodiments, X¹ is selected from Q, N, |
| | | H, S, T, Y, C, M, W, A, I, L, F, V, G; in |
| | | some embodiments, X¹ is H. |
| 151 | P36X¹ K764X² variant of | MILDTDYITK DGKPIIRIFK KENGEFKIEL DPHFQX¹YIYA |
| | Thermococcus litoralis DNA | LLKDDSAIEE IKAIKGERHG KSVRVVDAVK VKKKFLGREV |
| | polymerase, sequence 2 (acc. | EVWKLIFEHP QDVPAMRDKI KEHPAVIDIY EYDIPFAKRY |
| | ADK47977.1) | LIDKGLIPME GDEELKLLAF DIETFYHEGD EFGKGEIIMI |
| | | SYADEEEARV ITWKNIDLPY VDVVSNEREM IKRFVQVVKE |
| | | KDPDVIITYN GDNFDLPYLI KRAEKLGVRL VLGRDKENPE |
| | | PKIQRMGDSF AVEIKGRIHF DLFPVVRRTI NLPTYTLEAV |
| | | YEAVLGKTKS KLGAEEIAAI WETEESMKKL AQYSMEDARA |
| | | TYELGKEFFP MEAELAKLIG QSVWDVSRSS TGNLVEWYLL |
| | | RVAYERNELA PNKPDEEEYK RRLRTTYLGG YVKEPEKGLW |
| | | ENIIYLDFRS LYPSIIVTHN VSPDTLEKEG CENYDIAPIV |
| | | SYRFCKDFPG FIPSILGDLI AMRQEIKKKM KATIDPVERK |
| | | MLDYRQRAVK LLANSYYGYM GYPKARWYSK ECAESVTAWG |
| | | RHYIEMTIKE IEEKFGFKVL YADTDGFYAT ISGEKPEIIK |
| | | KKAREFLNYI NSKLPGLLEL EYEGFYLRGF FVTKKRYAVI |
| | | DEEGRITTRG LEVVRRDWSE IAKETQAKVL EAILKDGSVE |
| | | KAVEIVRDVL EKIAKYRVPL EKLVIHEQIT RDLKDYKAIG |
| | | PHVAIAKRLA ARGIKVKPGT IISYIVLKGS GKISDRVILL |
| | | TEYDPEKHKY DPDYYIENQV LPAVLRILEA FGYRKEDLRY |
| | | QSSXQTGLDA WLKR; |
| | | wherein X¹ is any amino acid other than P; in |
| | | some embodiments, X¹ is selected from Q, N, |
| | | H, S, T, Y, C, M, W, A, I, L, F, V, G; in |
| | | some embodiments, X¹ is H; and |
| | | wherein X² is selected from Q, N, H, S, T, Y, |
| | | C, M, W, A, I, L, F, V, P, and G; in some |
| | | embodiments, X² is selected from Q and N. |
| 152 | P36X¹ K764Q variant of | MILDTDYITK DGKPIIRIFK KENGEFKIEL DPHFQX¹YIYA |
| | Thermococcus litoralis DNA | LLKDDSAIEE IKAIKGERHG KSVRVVDAVK VKKKFLGREV |
| | polymerase, sequence 2 (acc. | EVWKLIFEHP QDVPAMRDKI KEHPAVIDIY EYDIPFAKRY |
| | ADK47977.1) | LIDKGLIPME GDEELKLLAF DIETFYHEGD EFGKGEIIMI |
| | | SYADEEEARV ITWKNIDLPY VDVVSNEREM IKRFVQVVKE |
| | | KDPDVIITYN GDNFDLPYLI KRAEKLGVRL VLGRDKENPE |
| | | PKIQRMGDSF AVEIKGRIHF DLFPVVRRTI NLPTYTLEAV |
| | | YEAVLGKTKS KLGAEEIAAI WETEESMKKL AQYSMEDARA |
| | | TYELGKEFFP MEAELAKLIG QSVWDVSRSS TGNLVEWYLL |
| | | RVAYERNELA PNKPDEEEYK RRLRTTYLGG YVKEPEKGLW |
| | | ENIIYLDFRS LYPSIIVTHN VSPDTLEKEG CENYDIAPIV |
| | | SYRFCKDFPG FIPSILGDLI AMRQEIKKKM KATIDPVERK |
| | | MLDYRQRAVK LLANSYYGYM GYPKARWYSK ECAESVTAWG |
| | | RHYIEMTIKE IEEKFGFKVL YADTDGFYAT ISGEKPEIIK |
| | | KKAREFLNYI NSKLPGLLEL EYEGFYLRGF FVTKKRYAVI |
| | | DEEGRITTRG LEVVRRDWSE IAKETQAKVL EAILKDGSVE |
| | | KAVEIVRDVL EKIAKYRVPL EKLVIHEQIT RDLKDYKAIG |
| | | PHVAIAKRLA ARGIKVKPGT IISYIVLKGS GKISDRVILL |
| | | TEYDPEKHKY DPDYYIENQV LPAVLRILEA FGYRKEDLRY |
| | | QSSQQTGLDA WLKR; |
| | | wherein X¹ is any amino acid other than P; in |
| | | some embodiments, X¹ is selected from Q, N, |
| | | H, S, T, Y, C, M, W, A, I, L, F, V, G; in |
| | | some embodiments, X¹ is H. |
| 153 | P36X¹ R761X² variant of | MILDTDYITE DGKPVIRIFK KENGEFKIDY DRNFEX¹YIYA |
| | Thermococcus gorgonarius | LLKDDSAIED VKKITAERHG TTVRVVRAEK VKKKFLGRPI |
| | DNA polymerase | EVWKLYFTHP QDVPAIRDKI KEHPAVVDIY EYDIPFAKRY |
| | | LIDKGLIPME GDEELKMLAF DIETLYHEGE EFAEGPILMI |
| | | SYADEEGARV ITWKNIDLPY VDVVSTEKEM IKRFLKVVKE |
| | | KDPDVLITYN GDNFDFAYLK KRSEKLGVKF ILGREGSEPK |
| | | IQRMGDRFAV EVKGRIHFDL YPVIRRTINL PTYTLEAVYE |
| | | AIFGQPKEKV YAEEIAQAWE TGEGLERVAR YSMEDAKVTY |
| | | ELGKEFFPME AQLSRLVGQS LWDVSRSSTG NLVEWFLLRK |
| | | AYERNELAPN KPDERELARR RESYAGGYVK EPERGLWENI |
| | | VYLDFRSLYP SIIITHNVSP DTLNREGCEE YDVAPQVGHK |
| | | FCKDFPGFIP SLLGDLLEER QKVKKKMKAT IDPIEKKLLD |
| | | YRQRAIKILA NSFYGYYGYA KARWYCKECA ESVTAWGRQY |
| | | IETTIREIEE KFGFKVLYAD TDGFFATIPG ADAETVKKKA |
| | | KEFLDYINAK LPGLLELEYE GFYKRGFFVT KKKYAVIDEE |
| | | DKITTRGLEI VRRDWSEIAK ETQARVLEAI LKHGDVEEAV |
| | | RIVKEVTEKL SKYEVPPEKL VIYEQITRDL KDYKATGPHV |
| | | AVAKRLAARG IKIRPGTVIS YIVLKGSGRI GDRAIPFDEF |
| | | DPAKHKYDAE YYIENQVLPA VERILRAFGY RKEDLRYQKT |
| | | XQVGLGAWLK PKT; |
| | | wherein X¹ is any amino acid other than P; in |
| | | some embodiments, X¹ is selected from Q, N, |
| | | H, S, T, Y, C, M, W, A, I, L, F, V, G; in |
| | | some embodiments, X¹ is H; and |
| | | wherein X² is selected from Q, N, H, S, T, Y, |
| | | C, M, W, A, I, L, F, V, P, and G; in some |
| | | embodiments, X² is selected from Q and N. |
| 154 | P36X¹ R761Q variant of | MILDTDYITE DGKPVIRIFK KENGEFKIDY DRNFEX¹YIYA |
| | Thermococcus gorgonarius | LLKDDSAIED VKKITAERHG TTVRVVRAEK VKKKFLGRPI |
| | DNA polymerase | EVWKLYFTHP QDVPAIRDKI KEHPAVVDIY EYDIPFAKRY |
| | | LIDKGLIPME GDEELKMLAF DIETLYHEGE EFAEGPILMI |
| | | SYADEEGARV ITWKNIDLPY VDVVSTEKEM IKRFLKVVKE |
| | | KDPDVLITYN GDNFDFAYLK KRSEKLGVKF ILGREGSEPK |
| | | IQRMGDRFAV EVKGRIHFDL YPVIRRTINL PTYTLEAVYE |
| | | AIFGQPKEKV YAEEIAQAWE TGEGLERVAR YSMEDAKVTY |
| | | ELGKEFFPME AQLSRLVGQS LWDVSRSSTG NLVEWFLLRK |
| | | AYERNELAPN KPDERELARR RESYAGGYVK EPERGLWENI |
| | | VYLDFRSLYP SIIITHNVSP DTLNREGCEE YDVAPQVGHK |
| | | FCKDFPGFIP SLLGDLLEER QKVKKKMKAT IDPIEKKLLD |
| | | YRQRAIKILA NSFYGYYGYA KARWYCKECA ESVTAWGRQY |
| | | IETTIREIEE KFGFKVLYAD TDGFFATIPG ADAETVKKKA |
| | | KEFLDYINAK LPGLLELEYE GFYKRGFFVT KKKYAVIDEE |
| | | DKITTRGLEI VRRDWSEIAK ETQARVLEAI LKHGDVEEAV |
| | | RIVKEVTEKL SKYEVPPEKL VIYEQITRDL KDYKATGPHV |
| | | AVAKRLAARG IKIRPGTVIS YIVLKGSGRI GDRAIPFDEF |
| | | DPAKHKYDAE YYIENQVLPA VERILRAFGY RKEDLRYQKT |
| | | QQVGLGAWLK PKT; |
| | | wherein X¹ is any amino acid other than P; in |
| | | some embodiments, X¹ is selected from Q, N, |
| | | H, S, T, Y, C, M, W, A, I, L, F, V, G; in |
| | | some embodiments, X¹ is H. |
| 155 | P36X¹ R761X² variant of | MILDTDYITE DGKPVIRIFK KENGEFKIEY DRIFEX¹YFYA |
| | Thermococcus kodakarensis | LLKDDSAIEE VKKITAERHG TVVTVKRVEK VQKKFLGRPV |
| | DNA polymerase | EVWKLYFTHP QDVPAIRDKI REHPAVIDIY EYDIPFAKRY |
| | | LIDKGLVPME GDEELKMLAF DIETLYHEGE EFAEGPILMI |
| | | SYADEEGARV ITWKNVDLPY VDVVSTEREM IKRFLRVVKE |
| | | KDPDVLITYN GDNFDFAYLK KRCEKLGINF ALGRDGSEPK |
| | | IQRMGDRFAV EVKGRIHFDL YPVIRRTINL PTYTLEAVYE |
| | | AVFGQPKEKV YAEEITTAWE TGENLERVAR YSMEDAKVTY |
| | | ELGKEFLPME AQLSRLIGQS LWDVSRSSTG NLVEWFLLRK |
| | | AYERNELAPN KPDEKELARR RQSYEGGYVK EPERGLWENI |
| | | VYLDFRSLYP SIIITHNVSP DTLNREGCKE YDVAPQVGHR |
| | | FCKDFPGFIP SLLGDLLEER QKIKKKMKAT IDPIERKLLD |
| | | YRQRAIKILA NSYYGYYGYA RARWYCKECA ESVTAWGREY |
| | | ITMTIKEIEE KYGFKVIYSD TDGFFATIPG ADAETVKKKA |
| | | MEFLKYINAK LPGALELEYE GFYKRGFFVT KKKYAVIDEE |
| | | GKITTRGLEI VRRDWSEIAK ETQARVLEAL LKDGDVEKAV |
| | | RIVKEVTEKL SKYEVPPEKL VIHEQITRDL KDYKATGPHV |
| | | AVAKRLAARG VKIRPGTVIS YIVLKGSGRI GDRAIPFDEF |
| | | DPTKHKYDAE YYIENQVLPA VERILRAFGY RKEDLRYQKT |
| | | XQVGLSAWLK PKGT; |
| | | wherein X¹ is any amino acid other than P; in |
| | | some embodiments, X¹ is selected from Q, N, |
| | | H, S, T, Y, C, M, W, A, I, L, F, V, G; in |
| | | some embodiments, X¹ is H; and |
| | | wherein X² is selected from Q, N, H, S, T, Y, |
| | | C, M, W, A, I, L, F, V, P, and G; in some |
| | | embodiments, X² is selected from Q and N. |
| 156 | P36X¹ R761Q variant of | MILDTDYITE DGKPVIRIFK KENGEFKIEY DRIFEX¹YFYA |
| | Thermococcus kodakarensis | LLKDDSAIEE VKKITAERHG TVVTVKRVEK VQKKFLGRPV |
| | DNA polymerase | EVWKLYFTHP QDVPAIRDKI REHPAVIDIY EYDIPFAKRY |
| | | LIDKGLVPME GDEELKMLAF DIETLYHEGE EFAEGPILMI |
| | | SYADEEGARV ITWKNVDLPY VDVVSTEREM IKRFLRVVKE |
| | | KDPDVLITYN GDNFDFAYLK KRCEKLGINF ALGRDGSEPK |
| | | IQRMGDRFAV EVKGRIHFDL YPVIRRTINL PTYTLEAVYE |
| | | AVFGQPKEKV YAEEITTAWE TGENLERVAR YSMEDAKVTY |
| | | ELGKEFLPME AQLSRLIGQS LWDVSRSSTG NLVEWFLLRK |
| | | AYERNELAPN KPDEKELARR RQSYEGGYVK EPERGLWENI |
| | | VYLDFRSLYP SIIITHNVSP DTLNREGCKE YDVAPQVGHR |
| | | FCKDFPGFIP SLLGDLLEER QKIKKKMKAT IDPIERKLLD |
| | | YRQRAIKILA NSYYGYYGYA RARWYCKECA ESVTAWGREY |
| | | ITMTIKEIEE KYGFKVIYSD TDGFFATIPG ADAETVKKKA |
| | | MEFLKYINAK LPGALELEYE GFYKRGFFVT KKKYAVIDEE |
| | | GKITTRGLEI VRRDWSEIAK ETQARVLEAL LKDGDVEKAV |
| | | RIVKEVTEKL SKYEVPPEKL VIHEQITRDL KDYKATGPHV |
| | | AVAKRLAARG VKIRPGTVIS YIVLKGSGRI GDRAIPFDEF |
| | | DPTKHKYDAE YYIENQVLPA VERILRAFGY RKEDLRYQKT |
| | | QQVGLSAWLK PKGT; |
| | | wherein X¹ is any amino acid other than P; in |
| | | some embodiments, X¹ is selected from Q, N, |
| | | H, S, T, Y, C, M, W, A, I, L, F, V, G; in |
| | | some embodiments, X¹ is H. |
| 157 | P36X¹ K761X² variant of | MILDTDYITE NGKPVIRVFK KENGEFKIEY DRIFEX¹YFYA |
| | Thermococcus species 9o N-7 | LLKDDSAIED VKKVTAKRHG TVVKVKRAEK VQKKFLGRPI |
| | DNA polymerase | EVWKLYFNHP QDVPAIRDRI RAHPAVVDIY EYDIPFAKRY |
| | | LIDKGLIPME GDEELTMLAF DIETLYHEGE EFGTGPILMI |
| | | SYADGSEARV ITWKKIDLPY VDVVSTEKEM IKRFLRVVRE |
| | | KDPDVLITYN GDNFDFAYLK KRCEELGIKF TLGRDGSEPK |
| | | IQRMGDRFAV EVKGRIHFDL YPVIRRTINL PTYTLEAVYE |
| | | AVFGKPKEKV YAEEIAQAWE SGEGLERVAR YSMEDAKVTY |
| | | ELGREFFPME AQLSRLIGQS LWDVSRSSTG NLVEWFLLRK |
| | | AYKRNELAPN KPDERELARR RGGYAGGYVK EPERGLWDNI |
| | | VYLDFRSLYP SIIITHNVSP DTLNREGCKE YDVAPEVGHK |
| | | FCKDFPGFIP SLLGDLLEER QKIKRKMKAT VDPLEKKLLD |
| | | YRQRAIKILA NSFYGYYGYA KARWYCKECA ESVTAWGREY |
| | | IEMVIRELEE KFGFKVLYAD TDGLHATIPG ADAETVKKKA |
| | | KEFLKYINPK LPGLLELEYE GFYVRGFFVT KKKYAVIDEE |
| | | GKITTRGLEI VRRDWSEIAK ETQARVLEAI LKHGDVEEAV |
| | | RIVKEVTEKL SKYEVPPEKL VIHEQITRDL RDYKATGPHV |
| | | AVAKRLAARG VKIRPGTVIS YIVLKGSGRI GDRAIPADEF |
| | | DPTKHRYDAE YYIENQVLPA VERILKAFGY RKEDLRYQKT |
| | | XQVGLGAWLK VKGKK; |
| | | wherein X¹ is any amino acid other than P; in |
| | | some embodiments, X¹ is selected from Q, N, |
| | | H, S, T, Y, C, M, W, A, I, L, F, V, G; in |
| | | some embodiments, X¹ is H; and |
| | | wherein X² is selected from Q, N, H, S, T, Y, |
| | | C, M, W, A, I, L, F, V, P, and G; in some |
| | | embodiments, X² is selected from Q and N. |
| 158 | P36X¹ K761Q variant of | MILDTDYITE NGKPVIRVFK KENGEFKIEY DRIFEX¹YFYA |
| | Thermococcus species 9o N-7 | LLKDDSAIED VKKVTAKRHG TVVKVKRAEK VQKKFLGRPI |
| | DNA polymerase | EVWKLYFNHP QDVPAIRDRI RAHPAVVDIY EYDIPFAKRY |
| | | LIDKGLIPME GDEELTMLAF DIETLYHEGE EFGTGPILMI |
| | | SYADGSEARV ITWKKIDLPY VDVVSTEKEM IKRFLRVVRE |
| | | KDPDVLITYN GDNFDFAYLK KRCEELGIKF TLGRDGSEPK |
| | | IQRMGDRFAV EVKGRIHFDL YPVIRRTINL PTYTLEAVYE |
| | | AVFGKPKEKV YAEEIAQAWE SGEGLERVAR YSMEDAKVTY |
| | | ELGREFFPME AQLSRLIGQS LWDVSRSSTG NLVEWFLLRK |
| | | AYKRNELAPN KPDERELARR RGGYAGGYVK EPERGLWDNI |
| | | VYLDFRSLYP SIIITHNVSP DTLNREGCKE YDVAPEVGHK |
| | | FCKDFPGFIP SLLGDLLEER QKIKRKMKAT VDPLEKKLLD |
| | | YRQRAIKILA NSFYGYYGYA KARWYCKECA ESVTAWGREY |
| | | IEMVIRELEE KFGFKVLYAD TDGLHATIPG ADAETVKKKA |
| | | KEFLKYINPK LPGLLELEYE GFYVRGFFVT KKKYAVIDEE |
| | | GKITTRGLEI VRRDWSEIAK ETQARVLEAI LKHGDVEEAV |
| | | RIVKEVTEKL SKYEVPPEKL VIHEQITRDL RDYKATGPHV |
| | | AVAKRLAARG VKIRPGTVIS YIVLKGSGRI GDRAIPADEF |
| | | DPTKHRYDAE YYIENQVLPA VERILKAFGY RKEDLRYQKT |
| | | QQVGLGAWLK VKGKK; |
| | | wherein X¹ is any amino acid other than P; in |
| | | some embodiments, X¹ is selected from Q, N, |
| | | H, S, T, Y, C, M, W, A, I, L, F, V, G; in |
| | | some embodiments, X¹ is H. |
| 159 | P40X¹ E775Q variant of | MRFWPLDATY SVVGGVPEVR VFGVDGEGRR VVLVDRRFRX¹ |
| | Pyrobaculum calidifontis DNA | YFYAKCDKCD ASLAKSYLSR VAPVEAVEVV ERRFFGRPTI |
| | polymerase | FLKVVAKVPE DVRKLREAAL GAPGVVDVYE ADIRYYMRYM |
| | | IDKGVVPCAW NVVEAREAGK LGPLPLYEVV EWAGVEEGFP |
| | | PPLRVLAFDI EVYNERGSPD PLRDPVVMLA VKTSDGREEV |
| | | FEAEGRDDRR VIRGFVDFVK EFDPDVIVGY NSNGFDWPYL |
| | | SERAKALGVP LRVDRLGGVP QQSVYGHWSV VGRANVDLYN |
| | | IVDEFPEIKV KTLDRVAEYF GVMKRSERVL IPGHKVYEYW |
| | | NDPAKRPTLM RYVLDDVRST LGLAEKLLPF LIQLSSVSGL |
| | | PLDQVAAASV GNRVEWMLLR YAYRMGEVAP NREEREYEPY |
| | | KGAIVLEPKP GLYSDVLVLD FSSMYPNIMM KYNLSPDTYL |
| | | EPHEPDPPEG VVVAPEVGHR FRKAPTGFIP AVLKHLVELR |
| | | RAVREEAKKY PPDSPEYRLL DERQRALKVM ANAMYGYLGW |
| | | VGARWYKKEV AESVTAFARA ILLDVVEYAK RLGIEVIYGD |
| | | TDSLFVKKSG AVDRLVKYVE ERHGIEIKVD KDYERVLFTE |
| | | AKKRYAGLLR DGRIDIVGFE VVRGDWCELA KEVQLNVVEL |
| | | ILKSKSVGEA RERVVKYVRE VVERLKAYKF DLDDLIIWKT |
| | | LDKELDEYKA YGPHVHAALE LKRRGYKVGK GTTVGYVIVR |
| | | GPGKVSERAM PYIFVDDASK VDVDYYIEKQ VIPAALRIAE |
| | | VLGVKESDLK TGRVQKSLLD FLG; |
| | | wherein X¹ is any amino acid other than P; in |
| | | some embodiments, X¹ is selected from Q, N, |
| | | H, S, T, Y, C, M, W, A, I, L, F, V, G; in |
| | | some embodiments, X¹ is H. |
| 160 | P42X¹ E778Q variant of | MKFKLWPLDA TYSVVGGVPE VRIFGISESG DRVVVVDRRF |
| | Pyrobaculum aerophilum DNA | RX¹YFYADCPA CDPESVRSQL GRVAPVEEVV AVERRYLGRP |
| | polymerase | RSFLKIVARV PEDVRKLREA AAALPGVSGV YEADIRFYMR |
| | | YMLDMGVVPC SWNTVDAEAT GEKLGNLPVY KVAEWGGVTE |
| | | GFPPPLRVLA FDIEVYNERG TPDPLRDPVI LLAVQASDGR |
| | | VEVFEASGRD DRSVLRSFID FVREFDPDVI VGYNSNQFDW |
| | | PYLAERARAL GIPLKVDRVG GAPQQSVYGH WSVTGRANVD |
| | | LYNIVDEFPE IKLKTLDRVA EYFGVMKREE RVLVPGHKIY |
| | | EYWRDQGKRP LLRQYVIDDV KSTYGLAEKL LPFLIQLSSV |
| | | SGLPLDQVAA ASVGNRVEWM LLRYAYRLGE VAPNREEREY |
| | | EPYKGAIVLE PRPGLYSDVL ALDFSSMYPN IMMKYNLSPD |
| | | TYLERGEPDP PGGVYVAPEV GHRFRREPPG FIPLVLRQLI |
| | | ELRKRVREEL KKYPPDSPEY RVLDERQRAL KIMANAMYGY |
| | | TGWVGARWYK KEVAESVTAF ARAILKDVIE YARKAGIVVI |
| | | YGDTDSLFVK KSGDVEKLVK YVEEKYGIDI KIDKDYSTVL |
| | | FTEAKKRYAG LLRDGRIDIV GFEVVRGDWS ELAKEVQLRV |
| | | IELILTSRDV SEARQKVVKY VRGVIDKLRN YEVDLDDLII |
| | | WKTLDKELDE YKAYPPHVHA AILLKKRGYK VGKGTTIGYV |
| | | VVKGGEKVSE RAVPYIFIDD IEKIDLDYYV ERQVIPAALR |
| | | IAEVIGIKEG DLKTGRSQRT LLDFF; |
| | | wherein X¹ is any amino acid other than P; in |
| | | some embodiments, X¹ is selected from Q, N, |
| | | H, S, T, Y, C, M, W, A, I, L, F, V, G; in |
| | | some embodiments, X¹ is H. |
| 161 | Pyrococcus DNA polymerase | MILDADYITE EGKPVIRLFK KENGEFKIEH DRTFRX¹YIYA |
| | sequence including | LLKDDSKIEE VKKITAERHG KIVRIVDAEK VEKKFLGRPI |
| | exonuclease domain and | TVWRLYFEHP QDVPTIREKI REHSAVVDIF EYDIPFAKRY |
| | catalytic domain, P36X¹ | LIDKGLIPME GDEELKLLAF DIETLYHEGE EFGKGPIIMI |
| | | SYADEEEAKV ITWKKIDLPY VEVVSSEREM IKRFLKIIRE |
| | | KDPDIIITYN GDSFDLPYLA KRAEKLGIKL TIGRDGSEPK |
| | | MQRIGDMTAV EVKGRIHFDL YHVIRRTINL PTYTLEAVYE |
| | | AIFGKPKEKV YADEIAKAWE TGEGLERVAK YSMEDAKATY |
| | | ELGKEFFPME AQLSRLVGQP LWDVSRSSTG NLVEWFLLRK |
| | | AYERNELAPN KPDEREYERR LRESYAGGFV KEPEKGLWEN |
| | | IVSLDFRALY PSIIITHNVS PDTLNREGCR NYDVAPEVGH |
| | | KFCKDFPGFI PSLLKRLLDE RQKIKTKMKA SQDPIEKIML |
| | | DYRQRAIKIL ANSYYGYYGY AKARWYCKEC AESVTAWGRE |
| | | YIEFVWKELE EKFGFKVLYI DTDGLYATIP GGKSEEIKKK |
| | | ALEFVDYINA KLPGLLELEY EGFYKRGFFV TKKKYALIDE |
| | | EGKIITRGLE IVRRDWSEIA KETQARVLEA ILKHGNVEEA |
| | | VRIVKEVTQK LSKYEIPPEK LAIYEQITRP LHEYKAIGPH |
| | | VAVAKRLAAK GVKIKPGMVI GYIVLRGDGP ISNRAILAEE |
| | | YDPRKHKYDA EYYIENQVLP AVLRILEGFG YRKEDLRWQK |
| | | TKQTGL; |
| | | wherein X¹ is any amino acid other than P; in |
| | | some embodiments, X¹ is selected from Q, N, |
| | | H, S, T, Y, C, M, W, A, I, L, F, V, G; in |
| | | some embodiments, X¹ is H. |
| 162 | Pyrococcus DNA polymerase | MILDADYITE EGKPVIRLFK KENGEFKIEH DRTFRX¹YIYA |
| | N-terminal domain comprising | LLKDDSKIEE VKKITAERHG KIVRIVDAEK VEKKFLGRPI |
| | a uracil-binding pocket, P36X¹ | TVWRLYFEHP QDVPTIREKI REHSAVVDIF EYDIPFAKRY |
| | | LIDKGLIPME G; |
| | | wherein X¹ is any amino acid other than P; in |
| | | some embodiments, X¹ is selected from Q, N, |
| | | H, S, T, Y, C, M, W, A, I, L, F, V, G; in |
| | | some embodiments, X¹ is H. |
| 163 | Pfu DNA polymerase | MILDVDYITE EGKPVIRLFK KENGKFKIEH DRTFRX¹YIYA |
| | (GenBank Acc. No. | LLRDDSKIEE VKKITGERHG KIVRIVDVEK VEKKFLGKPI |
| | WP_011011325.1) N-terminal | TVWKLYLEHP QDVPTIREKV REHPAVVDIF EYDIPFAKRY |
| | domain comprising a uracil- | LIDKGLIPME G; |
| | binding pocket, P36X¹ | wherein X¹ is any amino acid other than P; in |
| | | some embodiments, X¹ is selected from Q, N, |
| | | H, S, T, Y, C, M, W, A, I, L, F, V, G; in |
| | | some embodiments, X¹ is H. |
| 164 | Deep Vent DNA polymerase | MILDADYITE DGKPIIRIFK KENGEFKVEY DRNFRX¹YIYA |
| | N-terminal domain comprising | LLKDDSQIDE VRKITAERHG KIVRIIDAEK VRKKFLGRPI |
| | a uracil-binding pocket, P36X¹ | EVWRLYFEHP QDVPAIRDKI REHSAVIDIF EYDIPFAKRY |
| | | LIDKGLIPME G; |
| | | wherein X¹ is any amino acid other than P; in |
| | | some embodiments, X¹ is selected from Q, N, |
| | | H, S, T, Y, C, M, W, A, I, L, F, V, G; in |
| | | some embodiments, X¹ is H. |
| 165 | Thermococcus litoralis DNA | MILDTDYITK DGKPIIRIFK KENGEFKIEL DPHFQX¹YIYA |
| | polymerase N-terminal domain | LLKDDSAIEE IKAIKGERHG KTVRVLDAVK VRKKFLGREV |
| | comprising a uracil-binding | EVWKLIFEHP QDVPAMRGKI REHPAVVDIY EYDIPFAKRY |
| | pocket, P36X¹ | LIDKGLIPME G; |
| | | wherein X¹ is any amino acid other than P; in |
| | | some embodiments, X¹ is selected from Q, N, |
| | | H, S, T, Y, C, M, W, A, I, L, F, V, G; in |
| | | some embodiments, X¹ is H. |
| 166 | Thermococcus gorgonarius | MILDTDYITE DGKPVIRIFK KENGEFKIDY DRNFEX¹YIYA |
| | DNA polymerase N-terminal | LLKDDSAIED VKKITAERHG TTVRVVRAEK VKKKFLGRPI |
| | domain comprising a uracil- | EVWKLYFTHP QDVPAIRDKI KEHPAVVDIY EYDIPFAKRY |
| | binding pocket, P36X¹ | LIDKGLIPME G; |
| | | wherein X¹ is any amino acid other than P; in |
| | | some embodiments, X¹ is selected from Q, N, |
| | | H, S, T, Y, C, M, W, A, I, L, F, V, G; in |
| | | some embodiments, X¹ is H. |
| 167 | Thermococcus kodakarensis | MILDTDYITE DGKPVIRIFK KENGEFKIEY DRIFEX¹YFYA |
| | DNA polymerase N-terminal | LLKDDSAIEE VKKITAERHG TVVTVKRVEK VQKKFLGRPV |
| | domain comprising a uracil- | EVWKLYFTHP QDVPAIRDKI REHPAVIDIY EYDIPFAKRY |
| | binding pocket, P36X¹ | LIDKGLVPME G; |
| | | wherein X¹ is any amino acid other than P; in |
| | | some embodiments, X¹ is selected from Q, N, |
| | | H, S, T, Y, C, M, W, A, I, L, F, V, G; in |
| | | some embodiments, X¹ is H. |
| 168 | Thermococcus species 9o N-7 | MILDTDYITE NGKPVIRVFK KENGEFKIEY DRIFEX¹YFYA |
| | DNA polymerase N-terminal | LLKDDSAIED VKKVTAKRHG TVVKVKRAEK VQKKFLGRPI |
| | domain comprising a uracil- | EVWKLYFNHP QDVPAIRDRI RAHPAVVDIY EYDIPFAKRY |
| | binding pocket, P36X¹ | LIDKGLIPME G; |
| | | wherein X¹ is any amino acid other than P; in |
| | | some embodiments, X¹ is selected from Q, N, |
| | | H, S, T, Y, C, M, W, A, I, L, F, V, G; in |
| | | some embodiments, X¹ is H. |
| 169 | Pyrococcus DNA polymerase | MILDADYITE EGKPVIRLFK KENGEFKIEH DRTFRHYIYA |
| | sequence including | LLKDDSKIEE VKKITAERHG KIVRIVDAEK VEKKFLGRPI |
| | exonuclease domain and DNA | TVWRLYFEHP QDVPTIREKI REHSAVVDIF EYDIPFAKRY |
| | binding domain, P36H | LIDKGLIPME GDEELKLLAF DIETLYHEGE EFGKGPIIMI |
| | | SYADEEEAKV ITWKKIDLPY VEVVSSEREM IKRFLKIIRE |
| | | KDPDIIITYN GDSFDLPYLA KRAEKLGIKL TIGRDGSEPK |
| | | MQRIGDMTAV EVKGRIHFDL YHVIRRTINL PTYTLEAVYE |
| | | AIFGKPKEKV YADEIAKAWE TGEGLERVAK YSMEDAKATY |
| | | ELGKEFFPME AQLSRLVGQP LWDVSRSSTG NLVEWFLLRK |
| | | AYERNELAPN KPDEREYERR LRESYAGGFV KEPEKGLWEN |
| | | IVSLDFRALY PSIIITHNVS PDTLNREGCR NYDVAPEVGH |
| | | KFCKDFPGFI PSLLKRLLDE RQKIKTKMKA SQDPIEKIML |
| | | DYRQRAIKIL ANSYYGYYGY AKARWYCKEC AESVTAWGRE |
| | | YIEFVWKELE EKFGFKVLYI DTDGLYATIP GGKSEEIKKK |
| | | ALEFVDYINA KLPGLLELEY EGFYKRGFFV TKKKYALIDE |
| | | EGKIITRGLE IVRRDWSEIA KETQARVLEA ILKHGNVEEA |
| | | VRIVKEVTQK LSKYEIPPEK LAIYEQITRP LHEYKAIGPH |
| | | VAVAKRLAAK GVKIKPGMVI GYIVLRGDGP ISNRAILAEE |
| | | YDPRKHKYDA EYYIENQVLP AVLRILEGFG YRKEDLRWQK |
| | | TKQTGLTSWL NIKKSGTGGG GATVKFKYKG EEKEVDISKI |
| | | KKVWRVGKMI SFTYDEGGGK TGRGAVSEKD APKELLQMLE |
| | | KQKK |

What is claimed is:

1. A thermophilic DNA polymerase comprising a family B polymerase N-terminal domain comprising a uracil-binding pocket and a family B polymerase catalytic domain, the family B polymerase N-terminal domain comprising a uracil-binding pocket having an amino acid sequence in which the position corresponding to position 36 of SEQ ID NO: 1 is any amino acid other than P, and the family B polymerase catalytic domain having an amino acid sequence in which the position corresponding to position 762 of SEQ ID NO: 1 is a neutral amino acid residue.

2. The thermophilic DNA polymerase of claim 1, wherein the position corresponding to position 36 of SEQ ID NO: 1 is selected from Q, N, H, S, T, Y, C, M, W, A, I, L, F, V, and G.

3. The thermophilic DNA polymerase of claim 1, wherein the position corresponding to position 36 of SEQ ID NO: 1 is H.

4. The thermophilic DNA polymerase of any one of claims 1 to 3, wherein the position corresponding to position 762 of SEQ ID NO: 1 is selected from Q, N, H, S, T, Y, C, M, W, A, I, L, F, V, P, and G.

5. The thermophilic DNA polymerase of claim 4, wherein the position corresponding to position 762 of SEQ ID NO: 1 is selected from Q and N.

6. A thermophilic DNA polymerase comprising a family B polymerase N-terminal domain comprising a uracil-binding pocket and a family B polymerase catalytic domain, wherein the family B polymerase N-terminal domain comprising a uracil-binding pocket comprises a consecutive amino acid sequence of RX¹YIY (SEQ ID NO: 199), Q X¹YIY (SEQ ID NO: 200), E X¹YIY (SEQ ID NO: 201), E X¹YFY (SEQ ID NO: 202), or R X¹YFY (SEQ ID NO: 203), wherein X¹ is any amino acid other than P; and wherein the family B polymerase catalytic domain comprises a consecutive amino acid sequence of WQKTX² (SEQ ID NO: 204), X²QTGL (SEQ ID NO: 206), KTX²QT (SEQ ID NO: 208), YQKTX² (SEQ ID NO: 205), X²QVGL (SEQ ID NO: 207), KTX²QV (SEQ ID NO: 209), YQSSX² (SEQ ID NO: 210), X²QTGL (SEQ ID NO: 206), SSX²QT (SEQ ID NO: 211), TGRVX² (SEQ ID NO: 212), X²KSLL (SEQ ID NO: 213), RVX²KS (SEQ ID NO: 214), TGRSX² (SEQ ID NO: 215), X²RTLL (SEQ ID NO: 216), or RSX²RT (SEQ ID NO: 217),
wherein X² is a neutral amino acid residue;
wherein X¹ is within 50 residues of the N-terminus of the family B polymerase N-terminal domain comprising a uracil-binding pocket; and wherein X² is within 20 residues of the C-terminus of the family B polymerase catalytic domain.

7. The thermophilic DNA polymerase of any one of claims 1 to 6, wherein the family B polymerase catalytic domain has at least 80%, 85%, 90%, 95%, 98%, 99%, or 100% identity to the family B polymerase catalytic domain sequence of a sequence selected from SEQ ID NOs: 6 to 10, 15 to 18, 25, 26, 33, 34, 37, 38, 41, 42, and 45 to 48, wherein X is the neutral amino acid residue and is selected from Q, N, H, S, T, Y, C, M, W, A, I, L, F, V, P, and G.

8. The thermophilic DNA polymerase of claim 7, wherein X is selected from Q and N.

9. The thermophilic DNA polymerase of any one of claims 1 to 8, wherein the family B polymerase N-terminal domain comprising a uracil-binding pocket has at least 80%, 85%, 90%, 95%, 98%, 99%, or 100% identity to the family B polymerase N-terminal domain comprising a uracil-binding pocket sequence of a sequence selected from SEQ ID NOs: 115 to 121 and 162 to 168, wherein X¹ is any amino acid other than P.

10. The thermophilic DNA polymerase of any one of claims 6 to 9, wherein X¹ is selected from Q, N, H, S, T, Y, C, M, W, A, I, L, F, V, and G.

11. The thermophilic DNA polymerase of claim 10, wherein X¹ is H.

12. A thermophilic DNA polymerase comprising a family B polymerase N-terminal domain comprising a uracil-binding pocket and a family B polymerase catalytic domain, wherein the amino acid residue at the position of the amino acid sequence that aligns to position 36 of SEQ ID NO: 1 is any amino acid other than P, and wherein the amino acid residue at the position of the amino acid sequence that aligns to position 762 of SEQ ID NO: 1 is a neutral amino acid residue.

13. The thermophilic DNA polymerase of claim 12, wherein the amino acid residue at the position of the amino acid sequence that aligns to position 36 of SEQ ID NO: 1 is selected from Q, N, H, S, T, Y, C, M, W, A, I, L, F, V, and G.

14. The thermophilic DNA polymerase of claim 12, wherein the amino acid residue at the position of the amino acid sequence that aligns to position 36 of SEQ ID NO: 1 is H.

15. The thermophilic DNA polymerase of any one of claims 12 to 14, wherein the amino acid residue at the position of the amino acid sequence that aligns to position 762 of SEQ ID NO: 1 is selected from Q, N, H, S, T, Y, C, M, W, A, I, L, F, V, P, and G.

16. The thermophilic DNA polymerase of claim 15, wherein the amino acid residue at the position of the amino acid sequence that aligns to position 762 of SEQ ID NO: 1 is selected from Q and N.

17. The thermophilic DNA polymerase of any one of the preceding claims, wherein the family B polymerase catalytic domain has at least 80%, 85%, 90%, 95%, 98%, or 99% identity to SEQ ID NO: 6.

18. The thermophilic DNA polymerase of any one of the preceding claims, wherein the family B polymerase N-terminal domain comprising a uracil-binding pocket has at least 80%, 85%, 90%, 95%, 98%, 99%, or 100% identity to a sequence selected from SEQ ID NOs: 115 to 121 and 162 to 168, wherein X¹ is any amino acid other than P.

19. The thermophilic DNA polymerase of claim 18, wherein X¹ is selected from Q, N, H, S, T, Y, C, M, W, A, I, L, F, V, and G.

20. The thermophilic DNA polymerase of claim 18, wherein X¹ is H.

21. The thermophilic DNA polymerase of any of the preceding claims, wherein the amino acid residue at the position of the amino acid sequence that corresponds to position 408 of SEQ ID NO: 1 is a serine.

22. The thermophilic DNA polymerase of any one of the preceding claims, which comprises a sequence non-specific double-stranded DNA-binding domain.

23. The thermophilic DNA polymerase of claim 22, wherein the sequence non-specific double-stranded DNA-binding domain comprises an amino acid sequence having at least 75%, 80%, 85%, 90%, 95%, 98%, 99%, or 100% identity to a sequence selected from SEQ ID NOs: 53 to 62.

24. The thermophilic DNA polymerase of claim 22 or 23, wherein the sequence non-specific double-stranded DNA-binding domain is C-terminal to the family B polymerase catalytic domain.

25. The thermophilic DNA polymerase of any one of claims 22 to 24, wherein the sequence non-specific double-stranded DNA-binding domain is a 7 kD DNA-binding domain.

26. The thermophilic DNA polymerase of any one of claims 22 to 25, wherein the sequence non-specific double-stranded DNA-binding domain is an Sso7d, Sac7d, or Sac7e domain.

27. The thermophilic DNA polymerase of any one of the preceding claims, wherein the thermophilic DNA polymerase comprises:
(a) the consecutive amino acid residues LDFRS (SEQ ID NO: 196),
(b) the consecutive amino acid residues FRSLY (SEQ ID NO: 197), or
(c) the consecutive amino acid residues SLYPS (SEQ ID NO: 198),
wherein the underlined serine residue is within 30 amino acid residues of the N-terminus of the family B polymerase catalytic domain.

28. The thermophilic DNA polymerase of any one of the preceding claims, wherein the neutral amino acid residue is a polar neutral amino acid residue.

29. The thermophilic DNA polymerase of any one of the preceding claims, wherein the neutral amino acid residue comprises an amide.

30. The thermophilic DNA polymerase of any one of the preceding claims, wherein the neutral amino acid residue is selected from Q, N, H, S, T, Y, C, M, W, A, I, L, F, V, P, and G.

31. The thermophilic DNA polymerase of any one of the preceding claims, wherein the neutral amino acid residue is selected from Q and N.

32. The thermophilic DNA polymerase of any one of the preceding claims, wherein the neutral amino acid residue is Q.

33. The thermophilic DNA polymerase of any one of the preceding claims, wherein the position of the N-terminal domain comprising a uracil binding pocket that corresponds to, or aligns with, amino acid 36 of SEQ ID NO: 1 is H.

34. The thermophilic DNA polymerase of any one of the preceding claims, wherein the family B polymerase catalytic domain is a subfamily B3 polymerase domain.

35. The thermophilic DNA polymerase of any one of the preceding claims, which comprises a 3′ to 5′ exonuclease domain.

36. The thermophilic DNA polymerase of claim 35, wherein the 3′ to 5′ exonuclease domain is N-terminal to the family B polymerase catalytic domain.

37. The thermophilic DNA polymerase of claim 35 or 36, wherein the 3′ to 5′ exonuclease domain is a DEDDy archaeal exonuclease domain.

38. The thermophilic DNA polymerase of any one of claims 35 to 37, wherein the 3′ to 5′ exonuclease domain comprises an amino acid sequence having at least 90%, 95%, 98%, 99%, or 100% identity to SEQ ID NO: 63.

39. The thermophilic DNA polymerase of any one of claims 35 to 37, wherein the 3′ to 5′ exonuclease domain comprises an amino acid sequence having at least 90%, 95%, 98%, 99%, or 100% identity to the 3′ to 5′ exonuclease domain of a sequence selected from SEQ ID NOs: 1, 19, 23, 31, 35, 39, 43, 49, 51, 52, 76 to 79, 92, 96, 102, 104, 106, 108, 110, 112, and 113, 139, 143, 149, 151, 155, 157, 159, and 160.

40. The thermophilic DNA polymerase of any one of the preceding claims, wherein the thermophilic DNA polymerase comprises an amino acid sequence having at least 90%, 95%, 98%, 99%, or 100% identity to a sequence selected from SEQ ID NOs: 80 to 113 and 127 to 160, wherein X¹ is any amino acid other than P and X² is the neutral amino acid residue.

41. The thermophilic DNA polymerase of claim 40, wherein X¹ is selected from Q, N, H, S, T, Y, C, M, W, A, I, L, F, V, G.

42. The thermophilic DNA polymerase of claim 40, wherein X¹ is H.

43. The thermophilic DNA polymerase of any one of claims 40 to 42, wherein X² is selected from Q, N, H, S, T, Y, C, M, W, A, I, L, F, V, P, and G.

44. The thermophilic DNA polymerase of claim 43, wherein X² is selected from Q and N.

45. The thermophilic DNA polymerase of claim 43, wherein X² is Q.

46. The thermophilic DNA polymerase of any one of the preceding claims, wherein the thermophilic DNA polymerase comprises an amino acid sequence comprising (i) at least one difference at a position corresponding to position 15, 72, 93, 141, 143, 247, 265, 337, 385, 387, 388, 399, 400, 405, 407, 410, 485, 542, 546, 593, or 595 of SEQ ID NO: 1 or (ii) at least one missing residue corresponding to position 92, 93, 94, or 381 of SEQ ID NO: 1.

47. The thermophilic DNA polymerase of claim 46, wherein the at least one mismatch or missing residue comprises at least one of:
(i) a missing residue corresponding to position 92 or 94 of SEQ ID NO: 1;
(ii) a Q or R at the position corresponding to position 93 of SEQ ID NO: 1;
(iii) an A at the position corresponding to position 141 of SEQ ID NO: 1;
(iv) an A at the position corresponding to position 143 of SEQ ID NO: 1;
(v) an I at the position corresponding to position 337 of SEQ ID NO: 1;
(vi) a Q, S, N, L, or H at the position corresponding to position 385 of SEQ ID NO: 1;
(vii) a P or S at the position corresponding to position 387 of SEQ ID NO: 1;
(viii) a P at the position corresponding to position 388 of SEQ ID NO: 1;
(ix) a D at the position corresponding to position 399 of SEQ ID NO: 1;
(x) a G or D at the position corresponding to position 400 of SEQ ID NO: 1;
(xi) an E at the position corresponding to position 405 of SEQ ID NO: 1;
(xii) an I at the position corresponding to position 407 of SEQ ID NO: 1;
(xiii) an L or F at the position corresponding to position 410 of SEQ ID NO: 1;
(xiv) a T at the position corresponding to position 485 of SEQ ID NO: 1;
(xv) a P at the position corresponding to position 542 of SEQ ID NO: 1;
(xvi) an H at the position corresponding to position 546 of SEQ ID NO: 1;
(xvii) a T at the position corresponding to position 593 of SEQ ID NO: 1; or
(xviii) an S at the position corresponding to position 595 of SEQ ID NO: 1.

48. The thermophilic DNA polymerase of any one of the preceding claims, wherein the thermophilic DNA polymerase has at least one of the following properties:
(i) capable of amplifying a 2 kb target from 40 ng of human genomic DNA template in the presence of 0.2 μM heparin in a PCR; and/or
(ii) capable of amplifying a 2 kb target from 40 ng of human genomic DNA template in the presence of 400 ng/μl xylan in a PCR;
wherein amplification is successful if product is detectable by agarose gel electrophoresis and ethidium bromide staining within 30 PCR cycles.

49. The thermophilic DNA polymerase of any one of the preceding claims, wherein the thermophilic DNA polymerase is capable of amplifying a 2 kb target from 200 ng of human genomic DNA in the presence of at least 100 μM, at least 120 μM, at least 140 μM, at least 160 μM, at least 180 μM, or at least 200 μM dUTP, wherein amplification is successful if product is detectable by agarose gel electrophoresis and ethidium bromide staining within 30 PCR cycles.

50. The thermophilic DNA polymerase of any one of the preceding claims, wherein the thermophilic DNA polymerase is bound to a thermolabile inhibitor.

51. The thermophilic DNA polymerase of claim 50, wherein the thermolabile inhibitor comprises an antibody, an Affibody®, a chemical modification, or an oligonucleotide.

52. A method of in vitro nucleic acid synthesis comprising contacting at least one primer and at least one template with the thermophilic DNA polymerase of any one of claims 1-51 in the presence of at least one dNTP.

53. The method of claim 52, wherein the thermophilic DNA polymerase is initially bound to a thermolabile inhibitor and the method comprises denaturing the inhibitor.

54. The method of claim 52 or 53, further comprising amplification of the template.

55. The method of claim 54, wherein the amplification comprises PCR.

56. A nucleic acid comprising a sequence encoding the thermophilic DNA polymerase of any one of claims 1-51.

57. An expression vector comprising the nucleic acid of claim 56.

58. An isolated host cell comprising the nucleic acid of claim 56 or the expression vector of claim 57.

59. A method of producing a thermophilic DNA polymerase according to any one of claims 1-51, comprising culturing at least one host cell comprising a nucleic acid encoding the thermophilic DNA polymerase, wherein the at least one host cell expresses the thermophilic DNA polymerase.

60. The method of claim 59, further comprising isolating the thermophilic DNA polymerase.

61. A composition comprising a thermophilic DNA polymerase according to any one of claims 1-51.

62. The composition of claim 61, comprising at least one hot start inhibitor.

63. The composition of claim 61, comprising at least two hot start inhibitors.

64. The composition of claim 62 or claim 63, wherein each hot start inhibitor is independently selected from an antibody, an Affibody®, a chemical modification, and an oligonucleotide.

65. The composition of claim 63 or claim 64, wherein the composition comprises at least two antibodies.

66. The composition of claim 63 or claim 64, wherein the composition comprises an antibody and an oligonucleotide.

67. The composition of claim 66, wherein the oligonucleotide is an aptamer.

68. The composition of claim 63 or claim 64, wherein the composition comprises at least one antibody, and an Affibody® or aptamer.

69. The composition of any one of claims 61 to 68, wherein the composition is a storage composition.

70. The composition of claim 69, wherein the composition comprises at least one protein stabilizer.

71. The composition of claim 70, wherein the protein stabilizer is selected from BSA, inactive polymerase, and apotransferrin.

72. The composition of any one of claims 69 to 71, wherein the composition comprises a UTPase.

73. The composition of any one of claims 69 to 72, wherein the composition comprises at least one buffering agent.

74. The composition of claim 73, wherein the buffering agent is selected from acetate buffer, sulfate buffer, phosphate buffer, MOPS, HEPES and Tris-(hydroxymethyl)aminomethane (TRIS).

75. The composition of any one of claims 69 to 74, wherein the composition comprises at least one monovalent cationic salt.

76. The composition of claim 75, wherein the monovalent cationic salt is selected from KCl and NaCl.

77. The composition of any one of claims 69 to 76, wherein the composition comprises at least one stabilizer.

78. The composition of claim 77, wherein the stabilizer is selected from glycerol, trehalose, lactose, maltose, galactose, glucose, sucrose, dimethyl sulfoxide (DMSO), polyethylene glycol, and sorbitol.

79. The composition of any one of claims 69 to 78, wherein the composition comprises at least one reducing agent.

80. The composition of claim 79, wherein the reducing agent is dithiothreitol (DTT).

81. The composition of any one of claims 69 to 80, wherein the composition comprises at least one divalent chelating agent.

82. The composition of claim 81, wherein the divalent chelating agent is EDTA.

83. The composition of any one of claims 69 to 82, wherein the composition comprises at least one detergent.

84. The composition of claim 83, wherein the composition comprises a detergent selected from Hecameg (6-O—(N-Heptylcarbamoyl)-methyl-α-D-glucopyranoside), Trition X-200, Brij-58, CHAPS, n-Dodecyl-b-D-maltoside, NP-40, sodium dodecyl sulphate (SDS), TRITON® X-15, TRITON® X-35, TRITON® X-45, TRITON® X-100, TRITON® X-102, TRITON® X-114, TRITON® X-165, TRITON® X-305, TRITON® X-405, TRITON® X-705, Tween® 20 and/or ZWITTERGENT®.

85. The composition of any one of claims 61 to 84, which is an aqueous solution.

86. The composition of any one of claims 61 to 84, which is a lyophilized composition.

87. The composition of any one of claims 61 to 68, wherein the composition is a reaction composition.

88. The composition of claim 87, wherein the composition comprises at least one buffering agent.

89. The composition of claim 88, wherein the buffering agent is selected from acetate buffer, sulfate buffer, phosphate buffer, MOPS, HEPES and Tris-(hydroxymethyl)aminomethane (TRIS).

90. The composition of any one of claims 87 to 89, wherein the composition comprises at least one monovalent cationic salt.

91. The composition of claim 90, wherein the monovalent cationic salt is selected from KCl and NaCl.

92. The composition of any one of claims 87 to 91, wherein the composition comprises at least one divalent cationic salt.

93. The composition of claim 92, wherein the divalent cationic salt is MgCl₂ or MnCl₂.

94. The composition of any one of claims 87 to 93, wherein the composition comprises at least one detergent.

95. The composition of claim 94, wherein the composition comprises a detergent selected from Hecameg (6-O—(N-Heptylcarbamoyl)-methyl-α-D-glucopyranoside), Trition X-200, Brij-58, CHAPS, n-Dodecyl-b-D-maltoside, NP-40, sodium dodecyl sulphate (SDS), TRITON® X-15, TRITON® X-35, TRITON® X-45, TRITON® X-100, TRITON® X-102, TRITON® X-114, TRITON® X-165, TRITON® X-305, TRITON® X-405, TRITON® X-705, Tween® 20 and/or ZWITTERGENT®.

96. The composition of any one of claims 87 to 95, wherein the composition comprises at least one dNTP.

97. The composition of claim 96, wherein the composition comprises dATP, dGTP, dTTP, and/or dCTP.

98. The composition of any one of claims 87 to 97, wherein the composition further comprises glycerol, DMSO, and/or ammonium sulphate.

99. The composition of any one of claims 87 to 98, wherein the composition comprises at least one dye.

100. The composition of claim 99, wherein the composition comprises at least one dye selected from xylene cyanol FF, tartrazine, phenol red, quinoline yellow, zylene cyanol, Brilliant Blue, Patent Blue, indigocarmine, acid red 1, m-cresol purple, cresol red, neutral red, bromocresol green, acid violet 5, bromo phenol blue, and orange G.

101. The composition of any one of claims 87 to 100, wherein the composition comprises at least one agent that increases the density of the composition.

102. The composition of claim 101, wherein the composition comprises at least one agent selected from PEG 4000 and sucrose.

103. The composition of any one of claims 87 to 102, wherein the composition comprises at least one primer.

104. The composition of any one of claims 87 to 103, wherein the composition comprises at least one nucleic acid template.

The application's sequence listing, which the Patent Office published only in electronic form, follows.

SEQUENCE LISTING (218 sequences)

SEQ ID NO: 1 - protein, 775 aa, Pyrococcus furiosus
MILDVDYITEEGKPVIRLFKKENGKFKIEHDRTFRPYIYALLRDDSKIEEVKKITGERHGKIVRIVDVEKVEKKFLGKPITVWKLYLEHPQDVPTIREKVREHPAVVDIFEYDIPFAKRYLIDKGLIPMEGEEELKILAFDIETLYHEGEEFGKGPIIMISYADENEAKVITWKNIDLPYVEVVSSEREMIKRFLRIIREKDPDIIVTYNGDSFDFPYLAKRAEKLGIKLTIGRDGSEPKMQRIGDMTAVEVKGRIHFDLYHVITRTINLPTYTLEAVYEAIFGKPKEKVYADEIAKAWESGENLERVAKYSMEDAKATYELGKEFLPMEIQLSRLVGQPLWDVSRSSTGNLVEWFLLRKAYERNEVAPNKPSEEEYQRRLRESYTGGFVKEPEKGLWENIVYLDFRALYPSIIITHNVSPDTLNLEGCKNYDIAPQVGHKFCKDIPGFIPSLLGHLLEERQKIKTKMKETQDPIEKILLDYRQKAIKLLANSFYGYYGYAKARWYCKECAESVTAWGRKYIELVWKELEEKFGFKVLYIDTDGLYATIPGGESEEIKKKALEFVKYINSKLPGLLELEYEGFYKRGFFVTKKRYAVIDEEGKVITRGLEIVRRDWSEIAKETQARVLETILKHGDVEEAVRIVKEVIQKLANYEIPPEKLAIYEQITRPLHEYKAIGPHVAVAKKLAAKGVKIKPGMVIGYIVLRGDGPISNRAILAEEYDPKKHKYDAEYYIENQVLPAVLRILEGFGYRKEDLRYQKTRQVGLTSWLNIKKS

SEQ ID NO: 2 - protein, 775 aa, Artificial Sequence
  source: /note="Description of Artificial Sequence: Synthetic polypeptide"
  VARIANT (762)..(762): /replace="Asn" or "His" or "Ser" or "Thr" or "Tyr" or "Cys" or "Met" or "Trp" or "Ala" or "Ile" or "Leu" or "Phe" or "Val" or "Pro" or "Gly"
  MISC_FEATURE (1)..(775): /note="Variant residues given in the sequence have no preference with respect to those in the annotations for variant positions"
MILDVDYITEEGKPVIRLFKKENGKFKIEHDRTFRPYIYALLRDDSKIEEVKKITGERHGKIVRIVDVEKVEKKFLGKPITVWKLYLEHPQDVPTIREKVREHPAVVDIFEYDIPFAKRYLIDKGLIPMEGEEELKILAFDIETLYHEGEEFGKGPIIMISYADENEAKVITWKNIDLPYVEVVSSEREMIKRFLRIIREKDPDIIVTYNGDSFDFPYLAKRAEKLGIKLTIGRDGSEPKMQRIGDMTAVEVKGRIHFDLYHVITRTINLPTYTLEAVYEAIFGKPKEKVYADEIAKAWESGENLERVAKYSMEDAKATYELGKEFLPMEIQLSRLVGQPLWDVSRSSTGNLVEWFLLRKAYERNEVAPNKPSEEEYQRRLRESYTGGFVKEPEKGLWENIVYLDFRALYPSIIITHNVSPDTLNLEGCKNYDIAPQVGHKFCKDIPGFIPSLLGHLLEERQKIKTKMKETQDPIEKILLDYRQKAIKLLANSFYGYYGYAKARWYCKECAESVTAWGRKYIELVWKELEEKFGFKVLYIDTDGLYATIPGGESEEIKKKALEFVKYINSKLPGLLELEYEGFYKRGFFVTKKRYAVIDEEGKVITRGLEIVRRDWSEIAKETQARVLETILKHGDVEEAVRIVKEVIQKLANYEIPPEKLAIYEQITRPLHEYKAIGPHVAVAKKLAAKGVKIKPGMVIGYIVLRGDGPISNRAILAEEYDPKKHKYDAEYYIENQVLPAVLRILEGFGYRKEDLRYQKTQQVGLTSWLNIKKS

SEQ ID NO: 3 - protein, 775 aa, Artificial Sequence; identical to SEQ ID NO: 2
  source: /note="Description of Artificial Sequence: Synthetic polypeptide"

SEQ ID NO: 4 - protein, 775 aa, Artificial Sequence
  source: /note="Description of Artificial Sequence: Synthetic polypeptide"
  VARIANT (762)..(762): /replace="Asn" or "His" or "Ser" or "Thr" or "Tyr" or "Cys" or "Met" or "Trp" or "Ala" or "Ile" or "Leu" or "Phe" or "Val" or "Pro" or "Gly"
  MISC_FEATURE (1)..(775): /note="Variant residues given in the sequence have no preference with respect to those in the annotations for variant positions"
MILDVDYITEEGKPVIRLFKKENGKFKIEHDRTFRPYIYALLRDDSKIEEVKKITGERHGKIVRIVDVEKVEKKFLGKPITVWKLYLEHPQDVPTIREKVREHPAVVDIFEYDIPFAKRYLIDKGLIPMEGEEELKILAFDIETLYHEGEEFGKGPIIMISYADENEAKVITWKNIDLPYVEVVSSEREMIKRFLRIIREKDPDIIVTYNGDSFDFPYLAKRAEKLGIKLTIGRDGSEPKMQRIGDMTAVEVKGRIHFDLYHVITRTINLPTYTLEAVYEAIFGKPKEKVYADEIAKAWESGENLERVAKYSMEDAKATYELGKEFLPMEIQLSRLVGQPLWDVSRSSTGNLVEWFLLRKAYERNEVAPNKPSEEEYQRRLRESYTGGFVKEPEKGLWENIVYLDFRSLYPSIIITHNVSPDTLNLEGCKNYDIAPQVGHKFCKDIPGFIPSLLGHLLEERQKIKTKMKETQDPIEKILLDYRQKAIKLLANSFYGYYGYAKARWYCKECAESVTAWGRKYIELVWKELEEKFGFKVLYIDTDGLYATIPGGESEEIKKKALEFVKYINSKLPGLLELEYEGFYKRGFFVTKKRYAVIDEEGKVITRGLEIVRRDWSEIAKETQARVLETILKHGDVEEAVRIVKEVIQKLANYEIPPEKLAIYEQITRPLHEYKAIGPHVAVAKKLAAKGVKIKPGMVIGYIVLRGDGPISNRAILAEEYDPKKHKYDAEYYIENQVLPAVLRILEGFGYRKEDLRYQKTQQVGLTSWLNIKKS

SEQ ID NO: 5 - protein, 775 aa, Artificial Sequence; identical to SEQ ID NO: 4
  source: /note="Description of Artificial Sequence: Synthetic polypeptide"

SEQ ID NO: 6 - protein, 383 aa, Pyrococcus furiosus
SYTGGFVKEPEKGLWENIVYLDFRALYPSIIITHNVSPDTLNLEGCKNYDIAPQVGHKFCKDIPGFIPSLLGHLLEERQKIKTKMKETQDPIEKILLDYRQKAIKLLANSFYGYYGYAKARWYCKECAESVTAWGRKYIELVWKELEEKFGFKVLYIDTDGLYATIPGGESEEIKKKALEFVKYINSKLPGLLELEYEGFYKRGFFVTKKRYAVIDEEGKVITRGLEIVRRDWSEIAKETQARVLETILKHGDVEEAVRIVKEVIQKLANYEIPPEKLAIYEQITRPLHEYKAIGPHVAVAKKLAAKGVKIKPGMVIGYIVLRGDGPISNRAILAEEYDPKKHKYDAEYYIENQVLPAVLRILEGFGYRKEDLRYQKTRQVGL

SEQ ID NO: 7 - protein, 383 aa, Artificial Sequence
  source: /note="Description of Artificial Sequence: Synthetic polypeptide"
  VARIANT (379)..(379): /replace="Asn" or "His" or "Ser" or "Thr" or "Tyr" or "Cys" or "Met" or "Trp" or "Ala" or "Ile" or "Leu" or "Phe" or "Val" or "Pro" or "Gly"
  MISC_FEATURE (1)..(383): /note="Variant residues given in the sequence have no preference with respect to those in the annotations for variant positions"
SYTGGFVKEPEKGLWENIVYLDFRALYPSIIITHNVSPDTLNLEGCKNYDIAPQVGHKFCKDIPGFIPSLLGHLLEERQKIKTKMKETQDPIEKILLDYRQKAIKLLANSFYGYYGYAKARWYCKECAESVTAWGRKYIELVWKELEEKFGFKVLYIDTDGLYATIPGGESEEIKKKALEFVKYINSKLPGLLELEYEGFYKRGFFVTKKRYAVIDEEGKVITRGLEIVRRDWSEIAKETQARVLETILKHGDVEEAVRIVKEVIQKLANYEIPPEKLAIYEQITRPLHEYKAIGPHVAVAKKLAAKGVKIKPGMVIGYIVLRGDGPISNRAILAEEYDPKKHKYDAEYYIENQVLPAVLRILEGFGYRKEDLRYQKTQQVGL

SEQ ID NO: 8 - protein, 383 aa, Artificial Sequence
  source: /note="Description of Artificial Sequence: Synthetic polypeptide"
  VARIANT (379)..(379): /replace="Asn" or "His" or "Ser" or "Thr" or "Tyr" or "Cys" or "Met" or "Trp" or "Ala" or "Ile" or "Leu" or "Phe" or "Val" or "Pro" or "Gly"
  MISC_FEATURE (1)..(383): /note="Variant residues given in the sequence have no preference with respect to those in the annotations for variant positions"
SYTGGFVKEPEKGLWENIVYLDFRSLYPSIIITHNVSPDTLNLEGCKNYDIAPQVGHKFCKDIPGFIPSLLGHLLEERQKIKTKMKETQDPIEKILLDYRQKAIKLLANSFYGYYGYAKARWYCKECAESVTAWGRKYIELVWKELEEKFGFKVLYIDTDGLYATIPGGESEEIKKKALEFVKYINSKLPGLLELEYEGFYKRGFFVTKKRYAVIDEEGKVITRGLEIVRRDWSEIAKETQARVLETILKHGDVEEAVRIVKEVIQKLANYEIPPEKLAIYEQITRPLHEYKAIGPHVAVAKKLAAKGVKIKPGMVIGYIVLRGDGPISNRAILAEEYDPKKHKYDAEYYIENQVLPAVLRILEGFGYRKEDLRYQKTQQVGL

SEQ ID NO: 9 - protein, 383 aa, Artificial Sequence; identical to SEQ ID NO: 7
  source: /note="Description of Artificial Sequence: Synthetic polypeptide"

SEQ ID NO: 10 - protein, 383 aa, Artificial Sequence; identical to SEQ ID NO: 8
  source: /note="Description of Artificial Sequence: Synthetic polypeptide"

SEQ ID NO: 11 - protein, 844 aa, Artificial Sequence
  source: /note="Description of Artificial Sequence: Synthetic polypeptide"
  VARIANT (762)..(762): /replace="Asn" or "His" or "Ser" or "Thr" or "Tyr" or "Cys" or "Met" or "Trp" or "Ala" or "Ile" or "Leu" or "Phe" or "Val" or "Pro" or "Gly"
  MISC_FEATURE (1)..(844): /note="Variant residues given in the sequence have no preference with respect to those in the annotations for variant positions"
MILDVDYITEEGKPVIRLFKKENGKFKIEHDRTFRPYIYALLRDDSKIEEVKKITGERHGKIVRIVDVEKVEKKFLGKPITVWKLYLEHPQDVPTIREKVREHPAVVDIFEYDIPFAKRYLIDKGLIPMEGEEELKILAFDIETLYHEGEEFGKGPIIMISYADENEAKVITWKNIDLPYVEVVSSEREMIKRFLRIIREKDPDIIVTYNGDSFDFPYLAKRAEKLGIKLTIGRDGSEPKMQRIGDMTAVEVKGRIHFDLYHVITRTINLPTYTLEAVYEAIFGKPKEKVYADEIAKAWESGENLERVAKYSMEDAKATYELGKEFLPMEIQLSRLVGQPLWDVSRSSTGNLVEWFLLRKAYERNEVAPNKPSEEEYQRRLRESYTGGFVKEPEKGLWENIVYLDFRALYPSIIITHNVSPDTLNLEGCKNYDIAPQVGHKFCKDIPGFIPSLLGHLLEERQKIKTKMKETQDPIEKILLDYRQKAIKLLANSFYGYYGYAKARWYCKECAESVTAWGRKYIELVWKELEEKFGFKVLYIDTDGLYATIPGGESEEIKKKALEFVKYINSKLPGLLELEYEGFYKRGFFVTKKRYAVIDEEGKVITRGLEIVRRDWSEIAKETQARVLETILKHGDVEEAVRIVKEVIQKLANYEIPPEKLAIYEQITRPLHEYKAIGPHVAVAKKLAAKGVKIKPGMVIGYIVLRGDGPISNRAILAEEYDPKKHKYDAEYYIENQVLPAVLRILEGFGYRKEDLRYQKTQQVGLTSWLNIKKSGTGGGGATVKFKYKGEEKEVDISKIKKVWRVGKMISFTYDEGGGKTGRGAVSEKDAPKELLQMLEKQKK

SEQ ID NO: 12 - protein, 844 aa, Artificial Sequence; identical to SEQ ID NO: 11
  source: /note="Description of Artificial Sequence: Synthetic polypeptide"

SEQ ID NO: 13 - protein, 844 aa, Artificial Sequence
  source: /note="Description of Artificial Sequence: Synthetic polypeptide"
  VARIANT (762)..(762): /replace="Asn" or "His" or "Ser" or "Thr" or "Tyr" or "Cys" or "Met" or "Trp" or "Ala" or "Ile" or "Leu" or "Phe" or "Val" or "Pro" or "Gly"
  MISC_FEATURE (1)..(844): /note="Variant residues given in the sequence have no preference with respect to those in the annotations for variant positions"
MILDVDYITEEGKPVIRLFKKENGKFKIEHDRTFRPYIYALLRDDSKIEEVKKITGERHGKIVRIVDVEKVEKKFLGKPITVWKLYLEHPQDVPTIREKVREHPAVVDIFEYDIPFAKRYLIDKGLIPMEGEEELKILAFDIETLYHEGEEFGKGPIIMISYADENEAKVITWKNIDLPYVEVVSSEREMIKRFLRIIREKDPDIIVTYNGDSFDFPYLAKRAEKLGIKLTIGRDGSEPKMQRIGDMTAVEVKGRIHFDLYHVITRTINLPTYTLEAVYEAIFGKPKEKVYADEIAKAWESGENLERVAKYSMEDAKATYELGKEFLPMEIQLSRLVGQPLWDVSRSSTGNLVEWFLLRKAYERNEVAPNKPSEEEYQRRLRESYTGGFVKEPEKGLWENIVYLDFRSLYPSIIITHNVSPDTLNLEGCKNYDIAPQVGHKFCKDIPGFIPSLLGHLLEERQKIKTKMKETQDPIEKILLDYRQKAIKLLANSFYGYYGYAKARWYCKECAESVTAWGRKYIELVWKELEEKFGFKVLYIDTDGLYATIPGGESEEIKKKALEFVKYINSKLPGLLELEYEGFYKRGFFVTKKRYAVIDEEGKVITRGLEIVRRDWSEIAKETQARVLETILKHGDVEEAVRIVKEVIQKLANYEIPPEKLAIYEQITRPLHEYKAIGPHVAVAKKLAAKGVKIKPGMVIGYIVLRGDGPISNRAILAEEYDPKKHKYDAEYYIENQVLPAVLRILEGFGYRKEDLRYQKTQQVGLTSWLNIKKSGTGGGGATVKFKYKGEEKEVDISKIKKVWRVGKMISFTYDEGGGKTGRGAVSEKDAPKELLQMLEKQKK

SEQ ID NO: 14 - protein, 844 aa, Artificial Sequence; identical to SEQ ID NO: 13
  source: /note="Description of Artificial Sequence: Synthetic polypeptide"

SEQ ID NO: 15 - protein, 383 aa, Artificial Sequence
  source: /note="Description of Artificial Sequence: Synthetic polypeptide"
  VARIANT (379)..(379): /replace="Asn" or "His" or "Ser" or "Thr" or "Tyr" or "Cys" or "Met" or "Trp" or "Ala" or "Ile" or "Leu" or "Phe" or "Val" or "Pro" or "Gly"
  MISC_FEATURE (1)..(383): /note="Variant residues given in the sequence have no preference with respect to those in the annotations for variant positions"
SYAGGFVKEPEKGLWENIVSLDFRALYPSIIITHNVSPDTLNREGCRNYDVAPEVGHKFCKDFPGFIPSLLKRLLDERQKIKTKMKASQDPIEKIMLDYRQRAIKILANSYYGYYGYAKARWYCKECAESVTAWGREYIEFVWKELEEKFGFKVLYIDTDGLYATIPGGKSEEIKKKALEFVDYINAKLPGLLELEYEGFYKRGFFVTKKKYALIDEEGKIITRGLEIVRRDWSEIAKETQARVLEAILKHGNVEEAVRIVKEVTQKLSKYEIPPEKLAIYEQITRPLHEYKAIGPHVAVAKRLAAKGVKIKPGMVIGYIVLRGDGPISNRAILAEEYDPRKHKYDAEYYIENQVLPAVLRILEGFGYRKEDLRWQKTQQTGL

SEQ ID NO: 16 - protein, 383 aa, Artificial Sequence
  source: /note="Description of Artificial Sequence: Synthetic polypeptide"
  VARIANT (379)..(379): /replace="Asn" or "His" or "Ser" or "Thr" or "Tyr" or "Cys" or "Met" or "Trp" or "Ala" or "Ile" or "Leu" or "Phe" or "Val" or "Pro" or "Gly"
  MISC_FEATURE (1)..(383): /note="Variant residues given in the sequence have no preference with respect to those in the annotations for variant positions"
SYAGGFVKEPEKGLWENIVSLDFRSLYPSIIITHNVSPDTLNREGCRNYDVAPEVGHKFCKDFPGFIPSLLKRLLDERQKIKTKMKASQDPIEKIMLDYRQRAIKILANSYYGYYGYAKARWYCKECAESVTAWGREYIEFVWKELEEKFGFKVLYIDTDGLYATIPGGKSEEIKKKALEFVDYINAKLPGLLELEYEGFYKRGFFVTKKKYALIDEEGKIITRGLEIVRRDWSEIAKETQARVLEAILKHGNVEEAVRIVKEVTQKLSKYEIPPEKLAIYEQITRPLHEYKAIGPHVAVAKRLAAKGVKIKPGMVIGYIVLRGDGPISNRAILAEEYDPRKHKYDAEYYIENQVLPAVLRILEGFGYRKEDLRWQKTQQTGL

SEQ ID NO: 17 - protein, 383 aa, Artificial Sequence; identical to SEQ ID NO: 15
  source: /note="Description of Artificial Sequence: Synthetic polypeptide"

SEQ ID NO: 18 - protein, 383 aa, Artificial Sequence; identical to SEQ ID NO: 16
  source: /note="Description of Artificial Sequence: Synthetic polypeptide"

SEQ ID NO: 19 - protein, 844 aa, Artificial Sequence
  source: /note="Description of Artificial Sequence: Synthetic polypeptide"
  VARIANT (762)..(762): /replace="Asn" or "His" or "Ser" or "Thr" or "Tyr" or "Cys" or "Met" or "Trp" or "Ala" or "Ile" or "Leu" or "Phe" or "Val" or "Pro" or "Gly"
  MISC_FEATURE (1)..(844): /note="Variant residues given in the sequence have no preference with respect to those in the annotations for variant positions"
MILDADYITEEGKPVIRLFKKENGEFKIEHDRTFRPYIYALLKDDSKIEEVKKITAERHGKIVRIVDAEKVEKKFLGRPITVWRLYFEHPQDVPTIREKIREHSAVVDIFEYDIPFAKRYLIDKGLIPMEGDEELKLLAFDIETLYHEGEEFGKGPIIMISYADEEEAKVITWKKIDLPYVEVVSSEREMIKRFLKIIREKDPDIIITYNGDSFDLPYLAKRAEKLGIKLTIGRDGSEPKMQRIGDMTAVEVKGRIHFDLYHVIRRTINLPTYTLEAVYEAIFGKPKEKVYADEIAKAWETGEGLERVAKYSMEDAKATYELGKEFFPMEAQLSRLVGQPLWDVSRSSTGNLVEWFLLRKAYERNELAPNKPDEREYERRLRESYAGGFVKEPEKGLWENIVSLDFRALYPSIIITHNVSPDTLNREGCRNYDVAPEVGHKFCKDFPGFIPSLLKRLLDERQKIKTKMKASQDPIEKIMLDYRQRAIKILANSYYGYYGYAKARWYCKECAESVTAWGREYIEFVWKELEEKFGFKVLYIDTDGLYATIPGGKSEEIKKKALEFVDYINAKLPGLLELEYEGFYKRGFFVTKKKYALIDEEGKIITRGLEIVRRDWSEIAKETQARVLEAILKHGNVEEAVRIVKEVTQKLSKYEIPPEKLAIYEQITRPLHEYKAIGPHVAVAKRLAAKGVKIKPGMVIGYIVLRGDGPISNRAILAEEYDPRKHKYDAEYYIENQVLPAVLRILEGFGYRKEDLRWQKTQQTGLTSWLNIKKSGTGGGGATVKFKYKGEEKEVDISKIKKVWRVGKMISFTYDEGGGKTGRGAVSEKDAPKELLQMLEKQKK

SEQ ID NO: 20 - protein, 844 aa, Artificial Sequence; identical to SEQ ID NO: 19
  source: /note="Description of Artificial Sequence: Synthetic polypeptide"

SEQ ID NO: 21 - protein, 844 aa, Artificial Sequence
  source: /note="Description of Artificial Sequence: Synthetic polypeptide"
  VARIANT (762)..(762): /replace="Asn" or "His" or "Ser" or "Thr" or "Tyr" or "Cys" or "Met" or "Trp" or "Ala" or "Ile" or "Leu" or "Phe" or "Val" or "Pro" or "Gly"
  MISC_FEATURE (1)..(844): /note="Variant residues given in the sequence have no preference with respect to those in the annotations for variant positions"
MILDADYITEEGKPVIRLFKKENGEFKIEHDRTFRPYIYALLKDDSKIEEVKKITAERHGKIVRIVDAEKVEKKFLGRPITVWRLYFEHPQDVPTIREKIREHSAVVDIFEYDIPFAKRYLIDKGLIPMEGDEELKLLAFDIETLYHEGEEFGKGPIIMISYADEEEAKVITWKKIDLPYVEVVSSEREMIKRFLKIIREKDPDIIITYNGDSFDLPYLAKRAEKLGIKLTIGRDGSEPKMQRIGDMTAVEVKGRIHFDLYHVIRRTINLPTYTLEAVYEAIFGKPKEKVYADEIAKAWETGEGLERVAKYSMEDAKATYELGKEFFPMEAQLSRLVGQPLWDVSRSSTGNLVEWFLLRKAYERNELAPNKPDEREYERRLRESYAGGFVKEPEKGLWENIVSLDFRSLYPSIIITHNVSPDTLNREGCRNYDVAPEVGHKFCKDFPGFIPSLLKRLLDERQKIKTKMKASQDPIEKIMLDYRQRAIKILANSYYGYYGYAKARWYCKECAESVTAWGREYIEFVWKELEEKFGFKVLYIDTDGLYATIPGGKSEEIKKKALEFVDYINAKLPGLLELEYEGFYKRGFFVTKKKYALIDEEGKIITRGLEIVRRDWSEIAKETQARVLEAILKHGNVEEAVRIVKEVTQKLSKYEIPPEKLAIYEQITRPLHEYKAIGPHVAVAKRLAAKGVKIKPGMVIGYIVLRGDGPISNRAILAEEYDPRKHKYDAEYYIENQVLPAVLRILEGFGYRKEDLRWQKTQQTGLTSWLNIKKSGTGGGGATVKFKYKGEEKEVDISKIKKVWRVGKMISFTYDEGGGKTGRGAVSEKDAPKELLQMLEKQKK

SEQ ID NO: 22 - protein, 844 aa, Artificial Sequence; identical to SEQ ID NO: 21
  source: /note="Description of Artificial Sequence: Synthetic polypeptide"

SEQ ID NO: 23 - protein, 775 aa, Artificial Sequence
  source: /note="Description of Artificial Sequence: Synthetic polypeptide"
  VARIANT (762)..(762): /replace="Asn" or "His" or "Ser" or "Thr" or "Tyr" or "Cys" or "Met" or "Trp" or "Ala" or "Ile" or "Leu" or "Phe" or "Val" or "Pro" or "Gly"
  MISC_FEATURE (1)..(775): /note="Variant residues given in the sequence have no preference with respect to those in the annotations for variant positions"
MILDADYITEDGKPIIRIFKKENGEFKVEYDRNFRPYIYALLKDDSQIDEVRKITAERHGKIVRIIDAEKVRKKFLGRPIEVWRLYFEHPQDVPAIRDKIREHSAVIDIFEYDIPFAKRYLIDKGLIPMEGDEELKLLAFDIETLYHEGEEFAKGPIIMISYADEEEAKVITWKKIDLPYVEVVSSEREMIKRFLKVIREKDPDVIITYNGDSFDLPYLVKRAEKLGIKLPLGRDGSEPKMQRLGDMTAVEIKGRIHFDLYHVIRRTINLPTYTLEAVYEAIFGKPKEKVYAHEIAEAWETGKGLERVAKYSMEDAKVTYELGREFFPMEAQLSRLVGQPLWDVSRSSTGNLVEWYLLRKAYERNELAPNKPDEREYERRLRESYAGGYVKEPEKGLWEGLVSLDFRSLYPSIIITHNVSPDTLNREGCREYDVAPEVGHKFCKDFPGFIPSLLKRLLDERQEIKRKMKASKDPIEKKMLDYRQRAIKILANSYYGYYGYAKARWYCKECAESVTAWGREYIEFVRKELEEKFGFKVLYIDTDGLYATIPGAKPEEIKKKALEFVDYINAKLPGLLELEYEGFYVRGFFVTKKKYALIDEEGKIITRGLEIVRRDWSEIAKETQAKVLEAILKHGNVEEAVKIVKEVTEKLSKYEIPPEKLVIYEQITRPLHEYKAIGPHVAVAKRLAARGVKVRPGMVIGYIVLRGDGPISKRAILAEEFDLRKHKYDAEYYIENQVLPAVLRILEAFGYRKEDLRWQKTQQTGLTAWLNIKKK

SEQ ID NO: 24 - protein, 775 aa, Artificial Sequence; identical to SEQ ID NO: 23
  source: /note="Description of Artificial Sequence: Synthetic polypeptide"

SEQ ID NO: 25 - protein, 383 aa, Artificial Sequence
  source: /note="Description of Artificial Sequence: Synthetic polypeptide"
  VARIANT (379)..(379): /replace="Asn" or "His" or "Ser" or "Thr" or "Tyr" or "Cys" or "Met" or "Trp" or "Ala" or "Ile" or "Leu" or "Phe" or "Val" or "Pro" or "Gly"
  MISC_FEATURE (1)..(383): /note="Variant residues given in the sequence have no preference with respect to those in the annotations for variant positions"
SYAGGYVKEPEKGLWEGLVSLDFRSLYPSIIITHNVSPDTLNREGCREYDVAPEVGHKFCKDFPGFIPSLLKRLLDERQEIKRKMKASKDPIEKKMLDYRQRAIKILANSYYGYYGYAKARWYCKECAESVTAWGREYIEFVRKELEEKFGFKVLYIDTDGLYATIPGAKPEEIKKKALEFVDYINAKLPGLLELEYEGFYVRGFFVTKKKYALIDEEGKIITRGLEIVRRDWSEIAKETQAKVLEAILKHGNVEEAVKIVKEVTEKLSKYEIPPEKLVIYEQITRPLHEYKAIGPHVAVAKRLAARGVKVRPGMVIGYIVLRGDGPISKRAILAEEFDLRKHKYDAEYYIENQVLPAVLRILEAFGYRKEDLRWQKTQQTGL

SEQ ID NO: 26 - protein, 383 aa, Artificial Sequence; identical to SEQ ID NO: 25
  source: /note="Description of Artificial Sequence: Synthetic polypeptide"

SEQ ID NO: 27 - protein, 844 aa, Artificial Sequence
  source: /note="Description of Artificial Sequence: Synthetic polypeptide"
  VARIANT (762)..(762): /replace="Asn" or "His" or "Ser" or "Thr" or "Tyr" or "Cys" or "Met" or "Trp" or "Ala" or "Ile" or "Leu" or "Phe" or "Val" or "Pro" or "Gly"
  MISC_FEATURE (1)..(844): /note="Variant residues given in the sequence have no preference with respect to those in the annotations for variant positions"
MILDADYITEDGKPIIRIFKKENGEFKVEYDRNFRPYIYALLKDDSQIDEVRKITAERHGKIVRIIDAEKVRKKFLGRPIEVWRLYFEHPQDVPAIRDKIREHSAVIDIFEYDIPFAKRYLIDKGLIPMEGDEELKLLAFDIETLYHEGEEFAKGPIIMISYADEEEAKVITWKKIDLPYVEVVSSEREMIKRFLKVIREKDPDVIITYNGDSFDLPYLVKRAEKLGIKLPLGRDGSEPKMQRLGDMTAVEIKGRIHFDLYHVIRRTINLPTYTLEAVYEAIFGKPKEKVYAHEIAEAWETGKGLERVAKYSMEDAKVTYELGREFFPMEAQLSRLVGQPLWDVSRSSTGNLVEWYLLRKAYERNELAPNKPDEREYERRLRESYAGGYVKEPEKGLWEGLVSLDFRSLYPSIIITHNVSPDTLNREGCREYDVAPEVGHKFCKDFPGFIPSLLKRLLDERQEIKRKMKASKDPIEKKMLDYRQRAIKILANSYYGYYGYAKARWYCKECAESVTAWGREYIEFVRKELEEKFGFKVLYIDTDGLYATIPGAKPEEIKKKALEFVDYINAKLPGLLELEYEGFYVRGFFVTKKKYALIDEEGKIITRGLEIVRRDWSEIAKETQAKVLEAILKHGNVEEAVKIVKEVTEKLSKYEIPPEKLVIYEQITRPLHEYKAIGPHVAVAKRLAARGVKVRPGMVIGYIVLRGDGPISKRAILAEEFDLRKHKYDAEYYIENQVLPAVLRILEAFGYRKEDLRWQKTQQTGLTAWLNIKKKGTGGGGATVKFKYKGEEKEVDISKIKKVWRVGKMISFTYDEGGGKTGRGAVSEKDAPKELLQMLEKQKK

SEQ ID NO: 28 - protein, 844 aa, Artificial Sequence; identical to SEQ ID NO: 27
  source: /note="Description of Artificial Sequence: Synthetic polypeptide"

SEQ ID NO: 29 - protein, 844 aa, Artificial Sequence
  source: /note="Description of Artificial Sequence: Synthetic polypeptide"
  VARIANT (762)..(762): /replace="Asn" or "His" or "Ser" or "Thr" or "Tyr" or "Cys" or "Met" or "Trp" or "Ala" or "Ile" or "Leu" or "Phe" or "Val" or "Pro" or "Gly"
  MISC_FEATURE (1)..(844): /note="Variant residues given in the sequence have no preference with respect to those in the annotations for variant positions"
MILDADYITEDGKPIIRIFKKENGEFKVEYDRNFRPYIYALLKDDSQIDEVRKITAERHGKIVRIIDAEKVRKKFLGRPIEVWRLYFEHPQDVPAIRDKIREHSAVIDIFEYDIPFAKRYLIDKGLIPMEGDEELKLLAFDIETLYHEGEEFAKGPIIMISYADEEEAKVITWKKIDLPYVEVVSSEREMIKRFLKVIREKDPDVIITYNGDSFDLPYLVKRAEKLGIKLPLGRDGSEPKMQRLGDMTAVEIKGRIHFDLYHVIRRTINLPTYTLEAVYEAIFGKPKEKVYAHEIAEAWETGKGLERVAKYSMEDAKVTYELGREFFPMEAQLSRLVGQPLWDVSRSSTGNLVEWYLLRKAYERNELAPNKPDEREYERRLRESYAGGYVKEPEKGLWEGLVSLDFRSLYPSIIITHNVSPDTLNREGCREYDVAPEVGHKFCKDFPGFIPSLLKRLLDERQEIKRKMKASKDPIEKKMLDYRQRAIKILANSYYGYYGYAKARWYCKECAESVTAWGREYIEFVRKELEEKFGFKVLYIDTDGLYATIPGAKPEEIKKKALEFVDYINAKLPGLLELEYEGFYVRGFFVTKKKYALIDEEGKIITRGLEIVRRDWSEIAKETQAKVLEAILKHGNVEEAVKIVKEVTEKLSKYEIPPEKLVIYEQITRPLHEYKAIGPHVAVAKRLAARGVKVRPGMVIGYIVLRGDGPISKRAILAEEFDLRKHKYDAEYYIENQVLPAVLRILEAFGYRKEDLRWQKTQQTGLTAWLNIKKSGTGGGGATVKFKYKGEEKEVDISKIKKVWRVGKMISFTYDEGGGKTGRGAVSEKDAPKELLQMLEKQKK

SEQ ID NO: 30 - protein, 844 aa, Artificial Sequence; identical to SEQ ID NO: 29
  source: /note="Description of Artificial Sequence: Synthetic polypeptide"

SEQ ID NO: 31 - protein, 774 aa, Artificial Sequence
  source: /note="Description of Artificial Sequence: Synthetic polypeptide"
  VARIANT (764)..(764): /replace="Asn" or "His" or "Ser" or "Thr" or "Tyr" or "Cys" or "Met" or "Trp" or "Ala" or "Ile" or "Leu" or "Phe" or "Val" or "Pro" or "Gly"
  MISC_FEATURE (1)..(774): /note="Variant residues given in the sequence have no preference with respect to those in the annotations for variant positions"
MILDTDYITKDGKPIIRIFKKENGEFKIELDPHFQPYIYALLKDDSAIEEIKAIKGERHGKTVRVLDAVKVRKKFLGREVEVWKLIFEHPQDVPAMRGKIREHPAVVDIYEYDIPFAKRYLIDKGLIPMEGDEELKLLAFDIETFYHEGDEFGKGEIIMISYADEEEARVITWKNIDLPYVDVVSNEREMIKRFVQVVKEKDPDVIITYNGDNFDLPYLIKRAEKLGVRLVLGRDKEHPEPKIQRMGDSFAVEIKGRIHFDLFPVVRRTINLPTYTLEAVYEAVLGKTKSKLGAEEIAAIWETEESMKKLAQYSMEDARATYELGKEFFPMEAELAKLIGQSVWDVSRSSTGNLVEWYLLRVAYARNELAPNKPDEEEYKRRLRTTYLGGYVKEPEKGLWENIIYLDFRSLYPSIIVTHNVSPDTLEKEGCKNYDVAPIVGYRFCKDFPGFIPSILGDLIAMRQDIKKKMKSTIDPIEKKMLDYRQRAIKLLANSYYGYMGYPKARWYSKECAESVTAWGRHYIEMTIREIEEKFGFKVLYADTDGFYATIPGEKPELIKKKAKEFLNYINSKLPGLLELEYEGFYLRGFFVTKKRYAVIDEEGRITTRGLEVVRRDWSEIAKETQAKVLEAILKEGSVEKAVEVVRDVVEKIAKYRVPLEKLVIHEQITRDLKDYKAIGPHVAIAKRLAARGIKVKPGTIISYIVLKGSGKISDRVILLTEYDPRKHKYDPDYYIENQVLPAVLRILEAFGYRKEDLRYQSSQQTGLDAWLKR

SEQ ID NO: 32 - protein, 774 aa, Artificial Sequence; identical to SEQ ID NO: 31
  source: /note="Description of Artificial Sequence: Synthetic polypeptide"

SEQ ID NO: 33 - protein, 383 aa, Artificial Sequence
  source: /note="Description of Artificial Sequence: Synthetic polypeptide"
  VARIANT (379)..(379): /replace="Asn" or "His" or "Ser" or "Thr" or "Tyr" or "Cys" or "Met" or "Trp" or "Ala" or "Ile" or "Leu" or "Phe" or "Val" or "Pro" or "Gly"
  MISC_FEATURE (1)..(383): /note="Variant residues given in the sequence have no preference with respect to those in the annotations for variant positions"
TYLGGYVKEPEKGLWENIIYLDFRSLYPSIIVTHNVSPDTLEKEGCKNYDVAPIVGYRFCKDFPGFIPSILGDLIAMRQDIKKKMKSTIDPIEKKMLDYRQRAIKLLANSYYGYMGYPKARWYSKECAESVTAWGRHYIEMTIREIEEKFGFKVLYADTDGFYATIPGEKPELIKKKAKEFLNYINSKLPGLLELEYEGFYLRGFFVTKKRYAVIDEEGRITTRGLEVVRRDWSEIAKETQAKVLEAILKEGSVEKAVEVVRDVVEKIAKYRVPLEKLVIHEQITRDLKDYKAIGPHVAIAKRLAARGIKVKPGTIISYIVLKGSGKISDRVILLTEYDPRKHKYDPDYYIENQVLPAVLRILEAFGYRKEDLRYQSSQQTGL

SEQ ID NO: 34 - protein, 383 aa, Artificial Sequence; identical to SEQ ID NO: 33
  source: /note="Description of Artificial Sequence: Synthetic polypeptide"

SEQ ID NO: 35 - protein, 774 aa, Artificial Sequence
  source: /note="Description of Artificial Sequence: Synthetic polypeptide"
  VARIANT (764)..(764): /replace="Asn" or "His" or "Ser" or "Thr" or "Tyr" or "Cys" or "Met" or "Trp" or "Ala" or "Ile" or "Leu" or "Phe" or "Val" or "Pro" or "Gly"
  MISC_FEATURE (1)..(774): /note="Variant residues given in the sequence have no preference with respect to those in the annotations for variant positions"
MILDTDYITKDGKPIIRIFKKENGEFKIELDPHFQPYIYALLKDDSAIEEIKAIKGERHGKSVRVVDAVKVKKKFLGREVEVWKLIFEHPQDVPAMRDKIKEHPAVIDIYEYDIPFAKRYLIDKGLIPMEGDEELKLLAFDIETFYHEGDEFGKGEIIMISYADEEEARVITWKNIDLPYVDVVSNEREMIKRFVQVVKEKDPDVIITYNGDNFDLPYLIKRAEKLGVRLVLGRDKENPEPKIQRMGDSFAVEIKGRIHFDLFPVVRRTINLPTYTLEAVYEAVLGKTKSKLGAEEIAAIWETEESMKKLAQYSMEDARATYELGKEFFPMEAELAKLIGQSVWDVSRSSTGNLVEWYLLRVAYERNELAPNKPDEEEYKRRLRTTYLGGYVKEPEKGLWENIIYLDFRSLYPSIIVTHNVSPDTLEKEGCENYDIAPIVSYRFCKDFPGFIPSILGDLIAMRQEIKKKMKATIDPVERKMLDYRQRAVKLLANSYYGYMGYPKARWYSKECAESVTAWGRHYIEMTIKEIEEKFGFKVLYADTDGFYATISGEKPEIIKKKAREFLNYINSKLPGLLELEYEGFYLRGFFVTKKRYAVIDEEGRITTRGLEVVRRDWSEIAKETQAKVLEAILKDGSVEKAVEIVRDVLEKIAKYRVPLEKLVIHEQITRDLKDYKAIGPHVAIAKRLAARGIKVKPGTIISYIVLKGSGKISDRVILLTEYDPEKHKYDPDYYIENQVLPAVLRILEAFGYRKEDLRYQSSQQTGLDAWLKR

SEQ ID NO: 36 - protein, 774 aa, Artificial Sequence; identical to SEQ ID NO: 35
  source: /note="Description of Artificial Sequence: Synthetic polypeptide"

SEQ ID NO: 37 - protein, 383 aa, Artificial Sequence
  source: /note="Description of Artificial Sequence: Synthetic polypeptide"
  VARIANT (379)..(379): /replace="Asn" or "His" or "Ser" or "Thr" or "Tyr" or "Cys" or "Met" or "Trp" or "Ala" or "Ile" or "Leu" or "Phe" or "Val" or "Pro" or "Gly"
  MISC_FEATURE (1)..(383): /note="Variant residues given in the sequence have no preference with respect to those in the annotations for variant positions"
TYLGGYVKEPEKGLWENIIYLDFRSLYPSIIVTHNVSPDTLEKEGCENYDIAPIVSYRFCKDFPGFIPSILGDLIAMRQEIKKKMKATIDPVERKMLDYRQRAVKLLANSYYGYMGYPKARWYSKECAESVTAWGRHYIEMTIKEIEEKFGFKVLYADTDGFYATISGEKPEIIKKKAREFLNYINSKLPGLLELEYEGFYLRGFFVTKKRYAVIDEEGRITTRGLEVVRRDWSEIAKETQAKVLEAILKDGSVEKAVEIVRDVLEKIAKYRVPLEKLVIHEQITRDLKDYKAIGPHVAIAKRLAARGIKVKPGTIISYIVLKGSGKISDRVILLTEYDPEKHKYDPDYYIENQVLPAVLRILEAFGYRKEDLRYQSSQQTGL

SEQ ID NO: 38 - protein, 383 aa, Artificial Sequence; identical to SEQ ID NO: 37
  source: /note="Description of Artificial Sequence: Synthetic polypeptide"

SEQ ID NO: 39 - protein, 773 aa, Artificial Sequence
  source: /note="Description of Artificial Sequence: Synthetic polypeptide"
  VARIANT (761)..(761): /replace="Asn" or "His" or "Ser" or "Thr" or "Tyr" or "Cys" or "Met" or "Trp" or "Ala" or "Ile" or "Leu" or "Phe" or "Val" or "Pro" or "Gly"
  MISC_FEATURE (1)..(773): /note="Variant residues given in the sequence have no preference with respect to those in the annotations for variant positions"
MILDTDYITEDGKPVIRIFKKENGEFKIDYDRNFEPYIYALLKDDSAIEDVKKITAERHGTTVRVVRAEKVKKKFLGRPIEVWKLYFTHPQDVPAIRDKIKEHPAVVDIYEYDIPFAKRYLIDKGLIPMEGDEELKMLAFDIETLYHEGEEFAEGPILMISYADEEGARVITWKNIDLPYVDVVSTEKEMIKRFLKVVKEKDPDVLITYNGDNFDFAYLKKRSEKLGVKFILGREGSEPKIQRMGDRFAVEVKGRIHFDLYPVIRRTINLPTYTLEAVYEAIFGQPKEKVYAEEIAQAWETGEGLERVARYSMEDAKVTYELGKEFFPMEAQLSRLVGQSLWDVSRSSTGNLVEWFLLRKAYERNELAPNKPDERELARRRESYAGGYVKEPERGLWENIVYLDFRSLYPSIIITHNVSPDTLNREGCEEYDVAPQVGHKFCKDFPGFIPSLLGDLLEERQKVKKKMKATIDPIEKKLLDYRQRAIKILANSFYGYYGYAKARWYCKECAESVTAWGRQYIETTIREIEEKFGFKVLYADTDGFFATIPGADAETVKKKAKEFLDYINAKLPGLLELEYEGFYKRGFFVTKKKYAVIDEEDKITTRGLEIVRRDWSEIAKETQARVLEAILKHGDVEEAVRIVKEVTEKLSKYEVPPEKLVIYEQITRDLKDYKATGPHVAVAKRLAARGIKIRPGTVISYIVLKGSGRIGDRAIPFDEFDPAKHKYDAEYYIENQVLPAVERILRAFGYRKEDLRYQKTQQVGLGAWLKPKT

SEQ ID NO: 40 - protein, 773 aa, Artificial Sequence; identical to SEQ ID NO: 39
  source: /note="Description of Artificial Sequence: Synthetic polypeptide"

SEQ ID NO: 41 - protein, 383 aa, Artificial Sequence
  source: /note="Description of Artificial Sequence: Synthetic polypeptide"
  VARIANT (379)..(379): /replace="Asn" or "His" or "Ser" or "Thr" or "Tyr" or "Cys" or "Met" or "Trp" or "Ala" or "Ile" or "Leu" or "Phe" or "Val" or "Pro" or "Gly"
  MISC_FEATURE (1)..(383): /note="Variant residues given in the sequence have no preference with respect to those in the annotations for variant positions"
SYAGGYVKEPERGLWENIVYLDFRSLYPSIIITHNVSPDTLNREGCEEYDVAPQVGHKFCKDFPGFIPSLLGDLLEERQKVKKKMKATIDPIEKKLLDYRQRAIKILANSFYGYYGYAKARWYCKECAESVTAWGRQYIETTIREIEEKFGFKVLYADTDGFFATIPGADAETVKKKAKEFLDYINAKLPGLLELEYEGFYKRGFFVTKKKYAVIDEEDKITTRGLEIVRRDWSEIAKETQARVLEAILKHGDVEEAVRIVKEVTEKLSKYEVPPEKLVIYEQITRDLKDYKATGPHVAVAKRLAARGIKIRPGTVISYIVLKGSGRIGDRAIPFDEFDPAKHKYDAEYYIENQVLPAVERILRAFGYRKEDLRYQKTQQVGL

SEQ ID NO: 42 - protein, 383 aa, Artificial Sequence; identical to SEQ ID NO: 41
  source: /note="Description of Artificial Sequence: Synthetic polypeptide"

SEQ ID NO: 43 - protein, 774 aa, Artificial Sequence
  source: /note="Description of Artificial Sequence: Synthetic polypeptide"
  VARIANT (761)..(761): /replace="Asn" or "His" or "Ser" or "Thr" or "Tyr" or "Cys" or "Met" or "Trp" or "Ala" or "Ile" or "Leu" or "Phe" or "Val" or "Pro" or "Gly"
  MISC_FEATURE (1)..(774): /note="Variant residues given in the sequence have no preference with respect to those in the annotations for variant positions"
MILDTDYITEDGKPVIRIFKKENGEFKIEYDRTFEPYFYALLKDDSAIEEVKKITAERHGTVVTVKRVEKVQKKFLGRPVEVWKLYFTHPQDVPAIRDKIREHPAVIDIYEYDIPFAKRYLIDKGLVPMEGDEELKMLAFDIETLYHEGEEFAEGPILMISYADEEGARVITWKNVDLPYVDVVSTEREMIKRFLRVVKEKDPDVLITYNGDNFDFAYLKKRCEKLGINFALGRDGSEPKIQRMGDRFAVEVKGRIHFDLYPVIRRTINLPTYTLEAVYEAVFGQPKEKVYAEEITTAWETGENLERVARYSMEDAKVTYELGKEFLPMEAQLSRLIGQSLWDVSRSSTGNLVEWFLLRKAYERNELAPNKPDEKELARRRQSYEGGYVKEPERGLWENIVYLDFRSLYPSIIITHNVSPDTLNREGCKEYDVAPQVGHRFCKDFPGFIPSLLGDLLEERQKIKKKMKATIDPIERKLLDYRQRAIKILANSYYGYYGYARARWYCKECAESVTAWGREYITMTIKEIEEKYGFKVIYSDTDGFFATIPGADAETVKKKAMEFLKYINAKLPGALELEYEGFYKRGFFVTKKKYAVIDEEGKITTRGLEIVRRDWSEIAKETQARVLEALLKDGDVEKAVRIVKEVTEKLSKYEVPPEKLVIHEQITRDLKDYKATGPHVAVAKRLAARGVKIRPGTVISYIVLKGSGRIGDRAIPFDEFDPTKHKYDAEYYIENQVLPAVERILRAFGYRKEDLRYQKTQQVGLSAWLKPKGT

SEQ ID NO: 44 - protein, 774 aa, Artificial Sequence; identical to SEQ ID NO: 43
  source: /note="Description of Artificial Sequence: Synthetic polypeptide"

SEQ ID NO: 45 - protein, 383 aa, Artificial Sequence
  source: /note="Description of Artificial Sequence: Synthetic polypeptide"
  VARIANT (379)..(379): /replace="Asn" or "His" or "Ser" or "Thr" or "Tyr" or "Cys" or "Met" or "Trp" or "Ala" or "Ile" or "Leu" or "Phe" or "Val" or "Pro" or "Gly"
  MISC_FEATURE (1)..(383): /note="Variant residues given in the sequence have no preference with respect to those in the annotations for variant positions"
SYEGGYVKEPERGLWENIVYLDFRSLYPSIIITHNVSPDTLNREGCKEYDVAPQVGHRFCKDFPGFIPSLLGDLLEERQKIKKKMKATIDPIERKLLDYRQRAIKILANSYYGYYGYARARWYCKECAESVTAWGREYITMTIKEIEEKYGFKVIYSDTDGFFATIPGADAETVKKKAMEFLKYINAKLPGALELEYEGFYKRGFFVTKKKYAVIDEEGKITTRGLEIVRRDWSEIAKETQARVLEALLKDGDVEKAVRIVKEVTEKLSKYEVPPEKLVIHEQITRDLKDYKATGPHVAVAKRLAARGVKIRPGTVISYIVLKGSGRIGDRAIPFDEFDPTKHKYDAEYYIENQVLPAVERILRAFGYRKEDLRYQKTQQVGL

SEQ ID NO: 46 - protein, 383 aa, Artificial Sequence; identical to SEQ ID NO: 45
  source: /note="Description of Artificial Sequence: Synthetic polypeptide"

SEQ ID NO: 47 - protein, 383 aa, Artificial Sequence
  source: /note="Description of Artificial Sequence: Synthetic polypeptide"
  VARIANT (379)..(379): /replace="Asn" or "His" or "Ser" or "Thr" or "Tyr" or "Cys" or "Met" or "Trp" or "Ala" or "Ile" or "Leu" or "Phe" or "Val" or "Pro" or "Gly"
  MISC_FEATURE (1)..(383): /note="Variant residues given in the sequence have no preference with respect to those in the annotations for variant positions"
GYAGGYVKEPERGLWDNIVYLDFRSLYPSIIITHNVSPDTLNREGCKEYDVAPEVGHKFCKDFPGFIPSLLGDLLEERQKIKRKMKATVDPLEKKLLDYRQRAIKILANSFYGYYGYAKARWYCKECAESVTAWGREYIEMVIRELEEKFGFKVLYADTDGLHATIPGADAETVKKKAKEFLKYINPKLPGLLELEYEGFYVRGFFVTKKKYAVIDEEGKITTRGLEIVRRDWSEIAKETQARVLEAILKHGDVEEAVRIVKEVTEKLSKYEVPPEKLVIHEQITRDLRDYKATGPHVAVAKRLAARGVKIRPGTVISYIVLKGSGRIGDRAIPADEFDPTKHRYDAEYYIENQVLPAVERILKAFGYRKEDLRYQKTQQVGL

SEQ ID NO: 48 - protein, 383 aa, Artificial Sequence; identical to SEQ ID NO: 47
  source: /note="Description of Artificial Sequence: Synthetic polypeptide"

SEQ ID NO: 49 - protein, 775 aa, Artificial Sequence
  source: /note="Description of Artificial Sequence: Synthetic polypeptide"
  VARIANT (761)..(761): /replace="Asn" or "His" or "Ser" or "Thr" or "Tyr" or "Cys" or "Met" or "Trp" or "Ala" or "Ile" or "Leu" or "Phe" or "Val" or "Pro" or "Gly"
  MISC_FEATURE (1)..(775): /note="Variant residues given in the sequence have no preference with respect to those in the annotations for variant positions"
MILDTDYITENGKPVIRVFKKENGEFKIEYDRTFEPYFYALLKDDSAIEDVKKVTAKRHGTVVKVKRAEKVQKKFLGRPIEVWKLYFNHPQDVPAIRDRIRAHPAVVDIYEYDIPFAKRYLIDKGLIPMEGDEELTMLAFDIETLYHEGEEFGTGPILMISYADGSEARVITWKKIDLPYVDVVSTEKEMIKRFLRVVREKDPDVLITYNGDNFDFAYLKKRCEELGIKFTLGRDGSEPKIQRMGDRFAVEVKGRIHFDLYPVIRRTINLPTYTLEAVYEAVFGKPKEKVYAEEIAQAWESGEGLERVARYSMEDAKVTYELGREFFPMEAQLSRLIGQSLWDVSRSSTGNLVEWFLLRKAYKRNELAPNKPDERELARRRGGYAGGYVKEPERGLWDNIVYLDFRSLYPSIIITHNVSPDTLNREGCKEYDVAPEVGHKFCKDFPGFIPSLLGDLLEERQKIKRKMKATVDPLEKKLLDYRQRAIKILANSFYGYYGYAKARWYCKECAESVTAWGREYIEMVIRELEEKFGFKVLYADTDGLHATIPGADAETVKKKAKEFLKYINPKLPGLLELEYEGFYVRGFFVTKKKYAVIDEEGKITTRGLEIVRRDWSEIAKETQARVLEAILKHGDVEEAVRIVKEVTEKLSKYEVPPEKLVIHEQITRDLRDYKATGPHVAVAKRLAARGVKIRPGTVISYIVLKGSGRIGDRAIPADEFDPTKHRYDAEYYIENQVLPAVERILKAFGYRKEDLRYQKTQQVGLGAWLKVKGKK

SEQ ID NO: 50 - protein, 775 aa, Artificial Sequence; identical to SEQ ID NO: 49
  source: /note="Description of Artificial Sequence: Synthetic polypeptide"

SEQ ID NO: 51 - protein, 783 aa, Artificial Sequence
  source: /note="Description of Artificial Sequence: Synthetic polypeptide"
MRFWPLDATYSVVGGVPEVRVFGVDGEGRRVVLVDRRFRPYFYAKCDKCDASLAKSYLSRVAPVEAVEVVERRFFGRPTIFLKVVAKVPEDVRKLREAALGAPGVVDVYEADIRYYMRYMIDKGVVPCAWNVVEAREAGKLGPLPLYEVVEWAGVEEGFPPPLRVLAFDIEVYNERGSPDPLRDPVVMLAVKTSDGREEVFEAEGRDDRRVIRGFVDFVKEFDPDVIVGYNSNGFDWPYLSERAKALGVPLRVDRLGGVPQQSVYGHWSVVGRANVDLYNIVDEFPEIKVKTLDRVAEYFGVMKRSERVLIPGHKVYEYWNDPAKRPTLMRYVLDDVRSTLGLAEKLLPFLIQLSSVSGLPLDQVAAASVGNRVEWMLLRYAYRMGEVAPNREEREYEPYKGAIVLEPKPGLYSDVLVLDFSSMYPNIMMKYNLSPDTYLEPHEPDPPEGVVVAPEVGHRFRKAPTGFIPAVLKHLVELRRAVREEAKKYPPDSPEYRLLDERQRALKVMANAMYGYLGWVGARWYKKEVAESVTAFARAILLDVVEYAKRLGIEVIYGDTDSLFVKKSGAVDRLVKYVEERHGIEIKVDKDYERVLFTEAKKRYAGLLRDGRIDIVGFEVVRGDWCELAKEVQLNVVELILKSKSVGEARERVVKYVREVVERLKAYKFDLDDLIIWKTLDKELDEYKAYGPHVHAALELKRRGYKVGKGTTVGYVIVRGPGKVSERAMPYIFVDDASKVDVDYYIEKQVIPAALRIAEVLGVKESDLKTGRVQKSLLDFLG

SEQ ID NO: 52 - protein, 785 aa, Artificial Sequence
  source: /note="Description of Artificial Sequence: Synthetic polypeptide"
MKFKLWPLDATYSVVGGVPEVRIFGISESGDRVVVVDRRFRPYFYADCPACDPESVRSQLGRVAPVEEVVAVERRYLGRPRSFLKIVARVPEDVRKLREAAAALPGVSGVYEADIRFYMRYMLDMGVVPCSWNTVDAEATGEKLGNLPVYKVAEWGGVTEGFPPPLRVLAFDIEVYNERGTPDPLRDPVILLAVQASDGRVEVFEASGRDDRSVLRSFIDFVREFDPDVIVGYNSNQFDWPYLAERARALGIPLKVDRVGGAPQQSVYGHWSVTGRANVDLYNIVDEFPEIKLKTLDRVAEYFGVMKREERVLVPGHKIYEYWRDQGKRPLLRQYVIDDVKSTYGLAEKLLPFLIQLSSVSGLPLDQVAAASVGNRVEWMLLRYAYRLGEVAPNREEREYEPYKGAIVLEPRPGLYSDVLALDFSSMYPNIMMKYNLSPDTYLERGEPDPPGGVYVAPEVGHRFRREPPGFIPLVLRQLIELRKRVREELKKYPPDSPEYRVLDERQRALKIMANAMYGYTGWVGARWYKKEVAESVTAFARAILKDVIEYARKAGIVVIYGDTDSLFVKKSGDVEKLVKYVEEKYGIDIKIDKDYSTVLFTEAKKRYAGLLRDGRIDIVGFEVVRGDWSELAKEVQLRVIELILTSRDVSEARQKVVKYVRGVIDKLRNYEVDLDDLIIWKTLDKELDEYKAYPPHVHAAILLKKRGYKVGKGTTIGYVVVKGGEKVSERAVPYIFIDDIEKIDLDYYVERQVIPAALRIAEVIGIKEGDLKTGRSQRTLLDFF

SEQ ID NO: 53 - protein, 63 aa, Sulfolobus solfataricus
ATVKFKYKGEEKEVDISKIKKVWRVGKMISFTYDEGGGKTGRGAVSEKDAPKELLQMLEKQKK

SEQ ID NO: 54 - protein, 65 aa, Sulfolobus acidocaldarius
VKVKFKYKGEEKEVDTSKIKKVWRVGKMVSFTYDDNGKTGRGAVSEKDAPKELLDMLARAEREKK

SEQ ID NO: 55 - protein, 56 aa, Pyrobaculum aerophilum
SKKQKLKFYDIKAKQAFETDQYEVIEKQTARGPMMFAVAKSPYTGIKVYRLLGKKK

SEQ ID NO: 56 - protein, 55 aa, Pyrobaculum aerophilum
AKQKLKFYDIKAKQSFETDKYEVIEKETARGPMLFAVATSPYTGIKVYRLLGKKK

SEQ ID NO: 57 - protein, 55 aa, Aeropyrum pernix
PKKEKIKFFDLVAKKYYETDNYEVEIKETKRGKFRFAKAKSPYTGKIFYRVLGKA

SEQ ID NO: 58 - protein, 59 aa, Methanothermus fervidus
GELPIAPIGRIIKNAGAERVSDDARIALAKVLEEMGEEIASEAVKLAKHAGRKTIKAED

SEQ ID NO: 59 - protein, 59 aa, Methanothermus fervidus
ELPIAPIGRIIKDAGAERVSDDARITLAKILEEMGRDIASEAIKLARHAGRKTIKAEDI

SEQ ID NO: 60 - protein, 59 aa, Pyrococcus sp.
GELPIAPVDRLIRKAGAERVSEEAAKILAEYLEEYAIEVSKKAVEFARHAGRKTVKAED

SEQ ID NO: 61 - protein, 59 aa, Pyrococcus sp.
AELPIAPVDRLIRKAGAQRVSEQAAKLLAEHLEEKALEIARKAVDLAKHAGRKTVKAED

SEQ ID NO: 62 - protein, 62 aa, Sulfolobus solfataricus
ATVKFKYKGEEKEVDISKIKKVWRVGKMISFTYDEGGGKTGRGAVSEKDAPKELLQMLEKQK

SEQ ID NO: 63 - protein, 194 aa, Artificial Sequence
  source: /note="Description of Artificial Sequence: Synthetic polypeptide"
EELKLLAFDIETLYHEGEEFGKGPIIMISYADEEEAKVITWKKIDLPYVEVVSSEREMIKRFLKIIREKDPDIIITYNGDSFDLPYLAKRAEKLGIKLTIGRDGSEPKMQRIGDMTAVEVKGRIHFDLYHVIRRTINLPTYTLEAVYEAIFGKPKEKVYADEIAKAWETGEGLERVAKYSMEDAKATYELGKEF

SEQ ID NO: 64 - DNA, 20 bp, Artificial Sequence
  source: /note="Description of Artificial Sequence: Synthetic primer"
gaagagccaaggacaggtac

SEQ ID NO: 65 - DNA, 20 bp, Artificial Sequence
  source: /note="Description of Artificial Sequence: Synthetic primer"
cctccaaatcaagcctctac

SEQ ID NO: 66 - DNA, 22 bp, Artificial Sequence
  source: /note="Description of Artificial Sequence: Synthetic primer"
cagtgcagtgcttgataacagg

SEQ ID NO: 67 - DNA, 20 bp, Artificial Sequence
  source: /note="Description of Artificial Sequence: Synthetic primer"
gtagtgcgcgtttgatttcc

SEQ ID NO: 68 - DNA, 20 bp, Artificial Sequence
  source: /note="Description of Artificial Sequence: Synthetic primer"
cctgctctgccgcttcacgc

SEQ ID NO: 69 - DNA, 23 bp, Artificial Sequence
  source: /note="Description of Artificial Sequence: Synthetic primer"
cgaacgtcgcgcagagaaacagg

SEQ ID NO: 70 - DNA, 34 bp, Artificial Sequence
  source: /note="Description of Artificial Sequence: Synthetic primer"
ctgatgagttcgtgtccgtacaactggcgtaatc

SEQ ID NO: 71 - DNA, 34 bp, Artificial Sequence
  source: /note="Description of Artificial Sequence: Synthetic primer"
gtgcaccatgcaacatgaataacagtgggttatc

SEQ ID NO: 72 - DNA, 20 bp, Artificial Sequence
  source: /note="Description of Artificial Sequence: Synthetic primer"
gggcgttttccgtaacactg

SEQ ID NO: 73 - DNA, 20 bp, Artificial Sequence
  source: /note="Description of Artificial Sequence: Synthetic primer"
tgaccacatacaatcgccgt

SEQ ID NO: 74 - DNA, 29 bp, Artificial Sequence
  source: /note="Description of Artificial Sequence: Synthetic primer"
ctccacagggtgaggtctaagtgatgaca

SEQ ID NO: 75 - DNA, 29 bp, Artificial Sequence
  source: /note="Description of Artificial Sequence: Synthetic primer"
caatctcagggcaagttaagggaatagtg

SEQ ID NO: 76 - protein, 766 aa, Artificial Sequence
  source: /note="Description of Artificial Sequence: Synthetic polypeptide"
  VARIANT (762)..(762): /replace="Asn" or "His" or "Ser" or "Thr" or "Tyr" or "Cys" or "Met" or "Trp" or "Ala" or "Ile" or "Leu" or "Phe" or "Val" or "Pro" or "Gly"
  MISC_FEATURE (1)..(766): /note="Variant residues given in the sequence have no preference with respect to those in the annotations for variant positions"
MILDADYITEEGKPVIRLFKKENGEFKIEHDRTFRPYIYALLKDDSKIEEVKKITAERHGKIVRIVDAEKVEKKFLGRPITVWRLYFEHPQDVPTIREKIREHSAVVDIFEYDIPFAKRYLIDKGLIPMEGDEELKLLAFDIETLYHEGEEFGKGPIIMISYADEEEAKVITWKKIDLPYVEVVSSEREMIKRFLKIIREKDPDIIITYNGDSFDLPYLAKRAEKLGIKLTIGRDGSEPKMQRIGDMTAVEVKGRIHFDLYHVIRRTINLPTYTLEAVYEAIFGKPKEKVYADEIAKAWETGEGLERVAKYSMEDAKATYELGKEFFPMEAQLSRLVGQPLWDVSRSSTGNLVEWFLLRKAYERNELAPNKPDEREYERRLRESYAGGFVKEPEKGLWENIVSLDFRALYPSIIITHNVSPDTLNREGCRNYDVAPEVGHKFCKDFPGFIPSLLKRLLDERQKIKTKMKASQDPIEKIMLDYRQRAIKILANSYYGYYGYAKARWYCKECAESVTAWGREYIEFVWKELEEKFGFKVLYIDTDGLYATIPGGKSEEIKKKALEFVDYINAKLPGLLELEYEGFYKRGFFVTKKKYALIDEEGKIITRGLEIVRRDWSEIAKETQARVLEAILKHGNVEEAVRIVKEVTQKLSKYEIPPEKLAIYEQITRPLHEYKAIGPHVAVAKRLAAKGVKIKPGMVIGYIVLRGDGPISNRAILAEEYDPRKHKYDAEYYIENQVLPAVLRILEGFGYRKEDLRWQKTQQTGL

SEQ ID NO: 77 - protein, 766 aa, Artificial Sequence
  source: /note="Description of Artificial Sequence: Synthetic polypeptide"
  VARIANT (762)..(762): /replace="Asn" or "His" or "Ser" or "Thr" or "Tyr" or "Cys" or "Met" or "Trp" or "Ala" or "Ile" or "Leu" or "Phe" or "Val" or "Pro" or "Gly"
  MISC_FEATURE (1)..(766): /note="Variant residues given in the sequence have no preference with respect to those in the annotations for variant positions"
MILDADYITEEGKPVIRLFKKENGEFKIEHDRTFRPYIYALLKDDSKIEEVKKITAERHGKIVRIVDAEKVEKKFLGRPITVWRLYFEHPQDVPTIREKIREHSAVVDIFEYDIPFAKRYLIDKGLIPMEGDEELKLLAFDIETLYHEGEEFGKGPIIMISYADEEEAKVITWKKIDLPYVEVVSSEREMIKRFLKIIREKDPDIIITYNGDSFDLPYLAKRAEKLGIKLTIGRDGSEPKMQRIGDMTAVEVKGRIHFDLYHVIRRTINLPTYTLEAVYEAIFGKPKEKVYADEIAKAWETGEGLERVAKYSMEDAKATYELGKEFFPMEAQLSRLVGQPLWDVSRSSTGNLVEWFLLRKAYERNELAPNKPDEREYERRLRESYAGGFVKEPEKGLWENIVSLDFRSLYPSIIITHNVSPDTLNREGCRNYDVAPEVGHKFCKDFPGFIPSLLKRLLDERQKIKTKMKASQDPIEKIMLDYRQRAIKILANSYYGYYGYAKARWYCKECAESVTAWGREYIEFVWKELEEKFGFKVLYIDTDGLYATIPGGKSEEIKKKALEFVDYINAKLPGLLELEYEGFYKRGFFVTKKKYALIDEEGKIITRGLEIVRRDWSEIAKETQARVLEAILKHGNVEEAVRIVKEVTQKLSKYEIPPEKLAIYEQITRPLHEYKAIGPHVAVAKRLAAKGVKIKPGMVIGYIVLRGDGPISNRAILAEEYDPRKHKYDAEYYIENQVLPAVLRILEGFGYRKEDLRWQKTQQTGL

SEQ ID NO: 78 - protein, 766 aa, Artificial Sequence; identical to SEQ ID NO: 76
  source: /note="Description of Artificial Sequence: Synthetic polypeptide"

SEQ ID NO: 79 - protein, 766 aa, Artificial Sequence; identical to SEQ ID NO: 77
  source: /note="Description of Artificial Sequence: Synthetic polypeptide"

SEQ ID NO: 80 - protein, 775 aa, Artificial Sequence
  source: /note="Description of Artificial Sequence: Synthetic polypeptide"
  VARIANT (762)..(762): /replace="Asn" or "His" or "Ser" or "Thr" or "Tyr" or "Cys" or "Met" or "Trp" or "Ala" or "Ile" or "Leu" or "Phe" or "Val" or "Pro" or "Gly"
  MISC_FEATURE (1)..(775): /note="Variant residues given in the sequence have no preference with respect to those in the annotations for variant positions"
MILDVDYITEEGKPVIRLFKKENGKFKIEHDRTFRHYIYALLRDDSKIEEVKKITGERHGKIVRIVDVEKVEKKFLGKPITVWKLYLEHPQDVPTIREKVREHPAVVDIFEYDIPFAKRYLIDKGLIPMEGEEELKILAFDIETLYHEGEEFGKGPIIMISYADENEAKVITWKNIDLPYVEVVSSEREMIKRFLRIIREKDPDIIVTYNGDSFDFPYLAKRAEKLGIKLTIGRDGSEPKMQRIGDMTAVEVKGRIHFDLYHVITRTINLPTYTLEAVYEAIFGKPKEKVYADEIAKAWESGENLERVAKYSMEDAKATYELGKEFLPMEIQLSRLVGQPLWDVSRSSTGNLVEWFLLRKAYERNEVAPNKPSEEEYQRRLRESYTGGFVKEPEKGLWENIVYLDFRALYPSIIITHNVSPDTLNLEGCKNYDIAPQVGHKFCKDIPGFIPSLLGHLLEERQKIKTKMKETQDPIEKILLDYRQKAIKLLANSFYGYYGYAKARWYCKECAESVTAWGRKYIELVWKELEEKFGFKVLYIDTDGLYATIPGGESEEIKKKALEFVKYINSKLPGLLELEYEGFYKRGFFVTKKRYAVIDEEGKVITRGLEIVRRDWSEIAKETQARVLETILKHGDVEEAVRIVKEVIQKLANYEIPPEKLAIYEQITRPLHEYKAIGPHVAVAKKLAAKGVKIKPGMVIGYIVLRGDGPISNRAILAEEYDPKKHKYDAEYYIENQVLPAVLRILEGFGYRKEDLRYQKTQQVGLTSWLNIKKS

SEQ ID NO: 81 - protein, 775 aa, Artificial Sequence; identical to SEQ ID NO: 80
  source: /note="Description of Artificial Sequence: Synthetic polypeptide"

SEQ ID NO: 82 - protein, 775 aa, Artificial Sequence
  source: /note="Description of Artificial Sequence: Synthetic polypeptide"
  VARIANT (762)..(762): /replace="Asn" or "His" or "Ser" or "Thr" or "Tyr" or "Cys" or "Met" or "Trp" or "Ala" or "Ile" or "Leu" or "Phe" or "Val" or "Pro" or "Gly"
  MISC_FEATURE (1)..(775): /note="Variant residues given in the sequence have no preference with respect to those in the annotations for variant positions"
MILDVDYITEEGKPVIRLFKKENGKFKIEHDRTFRHYIYALLRDDSKIEEVKKITGERHGKIVRIVDVEKVEKKFLGKPITVWKLYLEHPQDVPTIREKVREHPAVVDIFEYDIPFAKRYLIDKGLIPMEGEEELKILAFDIETLYHEGEEFGKGPIIMISYADENEAKVITWKNIDLPYVEVVSSEREMIKRFLRIIREKDPDIIVTYNGDSFDFPYLAKRAEKLGIKLTIGRDGSEPKMQRIGDMTAVEVKGRIHFDLYHVITRTINLPTYTLEAVYEAIFGKPKEKVYADEIAKAWESGENLERVAKYSMEDAKATYELGKEFLPMEIQLSRLVGQPLWDVSRSSTGNLVEWFLLRKAYERNEVAPNKPSEEEYQRRLRESYTGGFVKEPEKGLWENIVYLDFRSLYPSIIITHNVSPDTLNLEGCKNYDIAPQVGHKFCKDIPGFIPSLLGHLLEERQKIKTKMKETQDPIEKILLDYRQKAIKLLANSFYGYYGYAKARWYCKECAESVTAWGRKYIELVWKELEEKFGFKVLYIDTDGLYATIPGGESEEIKKKALEFVKYINSKLPGLLELEYEGFYKRGFFVTKKRYAVIDEEGKVITRGLEIVRRDWSEIAKETQARVLETILKHGDVEEAVRIVKEVIQKLANYEIPPEKLAIYEQITRPLHEYKAIGPHVAVAKKLAAKGVKIKPGMVIGYIVLRGDGPISNRAILAEEYDPKKHKYDAEYYIENQVLPAVLRILEGFGYRKEDLRYQKTQQVGLTSWLNIKKS

SEQ ID NO: 83 - protein, 775 aa, Artificial Sequence; identical to SEQ ID NO: 82
  source: /note="Description of Artificial Sequence: Synthetic polypeptide"

SEQ ID NO: 84 - protein, 844 aa, Artificial Sequence
  source: /note="Description of Artificial Sequence: Synthetic polypeptide"
  VARIANT (762)..(762): /replace="Asn" or "His" or "Ser" or "Thr" or "Tyr" or "Cys" or "Met" or "Trp" or "Ala" or "Ile" or "Leu" or "Phe" or "Val" or "Pro" or "Gly"
  MISC_FEATURE (1)..(844): /note="Variant residues given in the sequence have no preference with respect to those in the annotations for variant positions"
MILDVDYITEEGKPVIRLFKKENGKFKIEHDRTFRHYIYALLRDDSKIEEVKKITGERHGKIVRIVDVEKVEKKFLGKPITVWKLYLEHPQDVPTIREKVREHPAVVDIFEYDIPFAKRYLIDKGLIPMEGEEELKILAFDIETLYHEGEEFGKGPIIMISYADENEAKVITWKNIDLPYVEVVSSEREMIKRFLRIIREKDPDIIVTYNGDSFDFPYLAKRAEKLGIKLTIGRDGSEPKMQRIGDMTAVEVKGRIHFDLYHVITRTINLPTYTLEAVYEAIFGKPKEKVYADEIAKAWESGENLERVAKYSMEDAKATYELGKEFLPMEIQLSRLVGQPLWDVSRSSTGNLVEWFLLRKAYERNEVAPNKPSEEEYQRRLRESYTGGFVKEPEKGLWENIVYLDFRALYPSIIITHNVSPDTLNLEGCKNYDIAPQVGHKFCKDIPGFIPSLLGHLLEERQKIKTKMKETQDPIEKILLDYRQKAIKLLANSFYGYYGYAKARWYCKECAESVTAWGRKYIELVWKELEEKFGFKVLYIDTDGLYATIPGGESEEIKKKALEFVKYINSKLPGLLELEYEGFYKRGFFVTKKRYAVIDEEGKVITRGLEIVRRDWSEIAKETQARVLETILKHGDVEEAVRIVKEVIQKLANYEIPPEKLAIYEQITRPLHEYKAIGPHVAVAKKLAAKGVKIKPGMVIGYIVLRGDGPISNRAILAEEYDPKKHKYDAEYYIENQVLPAVLRILEGFGYRKEDLRYQKTQQVGLTSWLNIKKSGTGGGGATVKFKYKGEEKEVDISKIKKVWRVGKMISFTYDEGGGKTGRGAVSEKDAPKELLQMLEKQKK

SEQ ID NO: 85 - protein, 844 aa, Artificial Sequence; identical to SEQ ID NO: 84
  source: /note="Description of Artificial Sequence: Synthetic polypeptide"

SEQ ID NO: 86 - protein, 844 aa, Artificial Sequence
  source: /note="Description of Artificial Sequence: Synthetic polypeptide"
  VARIANT (762)..(762): /replace="Asn" or "His" or "Ser" or "Thr" or "Tyr" or "Cys" or "Met" or "Trp" or "Ala" or "Ile" or "Leu" or "Phe" or "Val" or "Pro" or "Gly"
  MISC_FEATURE (1)..(844): /note="Variant residues given in the sequence have no preference with respect to those in the annotations for variant positions"
MILDVDYITEEGKPVIRLFKKENGKFKIEHDRTFRHYIYALLRDDSKIEEVKKITGERHGKIVRIVDVEKVEKKFLGKPITVWKLYLEHPQDVPTIREKVREHPAVVDIFEYDIPFAKRYLIDKGLIPMEGEEELKILAFDIETLYHEGEEFGKGPIIMISYADENEAKVITWKNIDLPYVEVVSSEREMIKRFLRIIREKDPDIIVTYNGDSFDFPYLAKRAEKLGIKLTIGRDGSEPKMQRIGDMTAVEVKGRIHFDLYHVITRTINLPTYTLEAVYEAIFGKPKEKVYADEIAKAWESGENLERVAKYSMEDAKATYELGKEFLPMEIQLSRLVGQPLWDVSRSSTGNLVEWFLLRKAYERNEVAPNKPSEEEYQRRLRESYTGGFVKEPEKGLWENIVYLDFRSLYPSIIITHNVSPDTLNLEGCKNYDIAPQVGHKFCKDIPGFIPSLLGHLLEERQKIKTKMKETQDPIEKILLDYRQKAIKLLANSFYGYYGYAKARWYCKECAESVTAWGRKYIELVWKELEEKFGFKVLYIDTDGLYATIPGGESEEIKKKALEFVKYINSKLPGLLELEYEGFYKRGFFVTKKRYAVIDEEGKVITRGLEIVRRDWSEIAKETQARVLETILKHGDVEEAVRIVKEVIQKLANYEIPPEKLAIYEQITRPLHEYKAIGPHVAVAKKLAAKGVKIKPGMVIGYIVLRGDGPISNRAILAEEYDPKKHKYDAEYYIENQVLPAVLRILEGFGYRKEDLRYQKTQQVGLTSWLNIKKSGTGGGGATVKFKYKGEEKEVDISKIKKVWRVGKMISFTYDEGGGKTGRGAVSEKDAPKELLQMLEKQKK

SEQ ID NO: 87 - protein, 844 aa, Artificial Sequence; identical to SEQ ID NO: 86
  source: /note="Description of Artificial Sequence: Synthetic polypeptide"

SEQ ID NO: 88 - protein, 766 aa, Artificial Sequence
  source: /note="Description of Artificial Sequence: Synthetic polypeptide"
  VARIANT (762)..(762): /replace="Asn" or "His" or "Ser" or "Thr" or "Tyr" or "Cys" or "Met" or "Trp" or "Ala" or "Ile" or "Leu" or "Phe" or "Val" or "Pro" or "Gly"
  MISC_FEATURE (1)..(766): /note="Variant residues given in the sequence have no preference with respect to those in the annotations for variant positions"
MILDADYITEEGKPVIRLFKKENGEFKIEHDRTFRHYIYALLKDDSKIEEVKKITAERHGKIVRIVDAEKVEKKFLGRPITVWRLYFEHPQDVPTIREKIREHSAVVDIFEYDIPFAKRYLIDKGLIPMEGDEELKLLAFDIETLYHEGEEFGKGPIIMISYADEEEAKVITWKKIDLPYVEVVSSEREMIKRFLKIIREKDPDIIITYNGDSFDLPYLAKRAEKLGIKLTIGRDGSEPKMQRIGDMTAVEVKGRIHFDLYHVIRRTINLPTYTLEAVYEAIFGKPKEKVYADEIAKAWETGEGLERVAKYSMEDAKATYELGKEFFPMEAQLSRLVGQPLWDVSRSSTGNLVEWFLLRKAYERNELAPNKPDEREYERRLRESYAGGFVKEPEKGLWENIVSLDFRALYPSIIITHNVSPDTLNREGCRNYDVAPEVGHKFCKDFPGFIPSLLKRLLDERQKIKTKMKASQDPIEKIMLDYRQRAIKILANSYYGYYGYAKARWYCKECAESVTAWGREYIEFVWKELEEKFGFKVLYIDTDGLYATIPGGKSEEIKKKALEFVDYINAKLPGLLELEYEGFYKRGFFVTKKKYALIDEEGKIITRGLEIVRRDWSEIAKETQARVLEAILKHGNVEEAVRIVKEVTQKLSKYEIPPEKLAIYEQITRPLHEYKAIGPHVAVAKRLAAKGVKIKPGMVIGYIVLRGDGPISNRAILAEEYDPRKHKYDAEYYIENQVLPAVLRILEGFGYRKEDLRWQKTQQTGL

SEQ ID NO: 89 - protein, 766 aa, Artificial Sequence
  source: /note="Description of Artificial Sequence: Synthetic polypeptide"
  VARIANT (762)..(762): /replace="Asn" or "His" or "Ser" or "Thr" or "Tyr" or "Cys" or "Met" or "Trp" or "Ala" or "Ile" or "Leu" or "Phe" or "Val" or "Pro" or "Gly"
  MISC_FEATURE (1)..(766): /note="Variant residues given in the sequence have no preference with respect to those in the annotations for variant positions"
MILDADYITEEGKPVIRLFKKENGEFKIEHDRTFRHYIYALLKDDSKIEEVKKITAERHGKIVRIVDAEKVEKKFLGRPITVWRLYFEHPQDVPTIREKIREHSAVVDIFEYDIPFAKRYLIDKGLIPMEGDEELKLLAFDIETLYHEGEEFGKGPIIMISYADEEEAKVITWKKIDLPYVEVVSSEREMIKRFLKIIREKDPDIIITYNGDSFDLPYLAKRAEKLGIKLTIGRDGSEPKMQRIGDMTAVEVKGRIHFDLYHVIRRTINLPTYTLEAVYEAIFGKPKEKVYADEIAKAWETGEGLERVAKYSMEDAKATYELGKEFFPMEAQLSRLVGQPLWDVSRSSTGNLVEWFLLRKAYERNELAPNKPDEREYERRLRESYAGGFVKEPEKGLWENIVSLDFRSLYPSIIITHNVSPDTLNREGCRNYDVAPEVGHKFCKDFPGFIPSLLKRLLDERQKIKTKMKASQDPIEKIMLDYRQRAIKILANSYYGYYGYAKARWYCKECAESVTAWGREYIEFVWKELEEKFGFKVLYIDTDGLYATIPGGKSEEIKKKALEFVDYINAKLPGLLELEYEGFYKRGFFVTKKKYALIDEEGKIITRGLEIVRRDWSEIAKETQARVLEAILKHGNVEEAVRIVKEVTQKLSKYEIPPEKLAIYEQITRPLHEYKAIGPHVAVAKRLAAKGVKIKPGMVIGYIVLRGDGPISNRAILAEEYDPRKHKYDAEYYIENQVLPAVLRILEGFGYRKEDLRWQKTQQTGL

SEQ ID NO: 90 - protein, 766 aa, Artificial Sequence; identical to SEQ ID NO: 88
  source: /note="Description of Artificial Sequence: Synthetic polypeptide"

SEQ ID NO: 91 - protein, 766 aa, Artificial Sequence; identical to SEQ ID NO: 89
  source: /note="Description of Artificial Sequence: Synthetic polypeptide"

SEQ ID NO: 92 - protein, 844 aa, Artificial Sequence
  source: /note="Description of Artificial Sequence: Synthetic polypeptide"
  VARIANT (762)..(762): /replace="Asn" or "His" or "Ser" or "Thr" or "Tyr" or "Cys" or "Met" or "Trp" or "Ala" or "Ile" or "Leu" or "Phe" or "Val" or "Pro" or "Gly"
  MISC_FEATURE (1)..(844): /note="Variant residues given in the sequence have no preference with respect to those in the annotations for variant positions"
MILDADYITEEGKPVIRLFKKENGEFKIEHDRTFRHYIYALLKDDSKIEEVKKITAERHGKIVRIVDAEKVEKKFLGRPITVWRLYFEHPQDVPTIREKIREHSAVVDIFEYDIPFAKRYLIDKGLIPMEGDEELKLLAFDIETLYHEGEEFGKGPIIMISYADEEEAKVITWKKIDLPYVEVVSSEREMIKRFLKIIREKDPDIIITYNGDSFDLPYLAKRAEKLGIKLTIGRDGSEPKMQRIGDMTAVEVKGRIHFDLYHVIRRTINLPTYTLEAVYEAIFGKPKEKVYADEIAKAWETGEGLERVAKYSMEDAKATYELGKEFFPMEAQLSRLVGQPLWDVSRSSTGNLVEWFLLRKAYERNELAPNKPDEREYERRLRESYAGGFVKEPEKGLWENIVSLDFRALYPSIIITHNVSPDTLNREGCRNYDVAPEVGHKFCKDFPGFIPSLLKRLLDERQKIKTKMKASQDPIEKIMLDYRQRAIKILANSYYGYYGYAKARWYCKECAESVTAWGREYIEFVWKELEEKFGFKVLYIDTDGLYATIPGGKSEEIKKKALEFVDYINAKLPGLLELEYEGFYKRGFFVTKKKYALIDEEGKIITRGLEIVRRDWSEIAKETQARVLEAILKHGNVEEAVRIVKEVTQKLSKYEIPPEKLAIYEQITRPLHEYKAIGPHVAVAKRLAAKGVKIKPGMVIGYIVLRGDGPISNRAILAEEYDPRKHKYDAEYYIENQVLPAVLRILEGFGYRKEDLRWQKTQQTGLTSWLNIKKSGTGGGGATVKFKYKGEEKEVDISKIKKVWRVGKMISFTYDEGGGKTGRGAVSEKDAPKELLQMLEKQKK

SEQ ID NO: 93 - protein, 844 aa, Artificial Sequence; identical to SEQ ID NO: 92
  source: /note="Description of Artificial Sequence: Synthetic polypeptide"

SEQ ID NO: 94 - protein, 844 aa, Artificial Sequence
  source: /note="Description of Artificial Sequence: Synthetic polypeptide"
  VARIANT (762)..(762): /replace="Asn" or "His" or "Ser" or "Thr" or "Tyr" or "Cys" or "Met" or "Trp" or "Ala" or "Ile" or "Leu" or "Phe" or "Val" or "Pro" or "Gly"
  MISC_FEATURE (1)..(844): /note="Variant residues given in the sequence have no preference with respect to those in the annotations for variant positions"
MILDADYITEEGKPVIRLFKKENGEFKIEHDRTFRHYIYALLKDDSKIEEVKKITAERHGKIVRIVDAEKVEKKFLGRPITVWRLYFEHPQDVPTIREKIREHSAVVDIFEYDIPFAKRYLIDKGLIPMEGDEELKLLAFDIETLYHEGEEFGKGPIIMISYADEEEAKVITWKKIDLPYVEVVSSEREMIKRFLKIIREKDPDIIITYNGDSFDLPYLAKRAEKLGIKLTIGRDGSEPKMQRIGDMTAVEVKGRIHFDLYHVIRRTINLPTYTLEAVYEAIFGKPKEKVYADEIAKAWETGEGLERVAKYSMEDAKATYELGKEFFPMEAQLSRLVGQPLWDVSRSSTGNLVEWFLLRKAYERNELAPNKPDEREYERRLRESYAGGFVKEPEKGLWENIVSLDFRSLYPSIIITHNVSPDTLNREGCRNYDVAPEVGHKFCKDFPGFIPSLLKRLLDERQKIKTKMKASQDPIEKIMLDYRQRAIKILANSYYGYYGYAKARWYCKECAESVTAWGREYIEFVWKELEEKFGFKVLYIDTDGLYATIPGGKSEEIKKKALEFVDYINAKLPGLLELEYEGFYKRGFFVTKKKYALIDEEGKIITRGLEIVRRDWSEIAKETQARVLEAILKHGNVEEAVRIVKEVTQKLSKYEIPPEKLAIYEQITRPLHEYKAIGPHVAVAKRLAAKGVKIKPGMVIGYIVLRGDGPISNRAILAEEYDPRKHKYDAEYYIENQVLPAVLRILEGFGYRKEDLRWQKTQQTGLTSWLNIKKSGTGGGGATVKFKYKGEEKEVDISKIKKVWRVGKMISFTYDEGGGKTGRGAVSEKDAPKELLQMLEKQKK

SEQ ID NO: 95 - protein, 844 aa, Artificial Sequence; identical to SEQ ID NO: 94
  source: /note="Description of Artificial Sequence: Synthetic polypeptide"

SEQ ID NO: 96 - protein, 775 aa, Artificial Sequence
  source: /note="Description of Artificial Sequence: Synthetic polypeptide"
  VARIANT (762)..(762): /replace="Asn" or "His" or "Ser" or "Thr" or "Tyr" or "Cys" or "Met" or "Trp" or "Ala" or "Ile" or "Leu" or "Phe" or "Val" or "Pro" or "Gly"
  MISC_FEATURE (1)..(775): /note="Variant residues given in the sequence have no preference with respect to those in the annotations for variant positions"
MILDADYITEDGKPIIRIFKKENGEFKVEYDRNFRHYIYALLKDDSQIDEVRKITAERHGKIVRIIDAEKVRKKFLGRPIEVWRLYFEHPQDVPAIRDKIREHSAVIDIFEYDIPFAKRYLIDKGLIPMEGDEELKLLAFDIETLYHEGEEFAKGPIIMISYADEEEAKVITWKKIDLPYVEVVSSEREMIKRFLKVIREKDPDVIITYNGDSFDLPYLVKRAEKLGIKLPLGRDGSEPKMQRLGDMTAVEIKGRIHFDLYHVIRRTINLPTYTLEAVYEAIFGKPKEKVYAHEIAEAWETGKGLERVAKYSMEDAKVTYELGREFFPMEAQLSRLVGQPLWDVSRSSTGNLVEWYLLRKAYERNELAPNKPDEREYERRLRESYAGGYVKEPEKGLWEGLVSLDFRSLYPSIIITHNVSPDTLNREGCREYDVAPEVGHKFCKDFPGFIPSLLKRLLDERQEIKRKMKASKDPIEKKMLDYRQRAIKILANSYYGYYGYAKARWYCKECAESVTAWGREYIEFVRKELEEKFGFKVLYIDTDGLYATIPGAKPEEIKKKALEFVDYINAKLPGLLELEYEGFYVRGFFVTKKKYALIDEEGKIITRGLEIVRRDWSEIAKETQAKVLEAILKHGNVEEAVKIVKEVTEKLSKYEIPPEKLVIYEQITRPLHEYKAIGPHVAVAKRLAARGVKVRPGMVIGYIVLRGDGPISKRAILAEEFDLRKHKYDAEYYIENQVLPAVLRILEAFGYRKEDLRWQKTQQTGLTAWLNIKKK

SEQ ID NO: 97 - protein, 775 aa, Pyrococcus sp.; identical to SEQ ID NO: 96

SEQ ID NO: 98 - protein, 844 aa, Artificial Sequence
  source: /note="Description of Artificial Sequence: Synthetic polypeptide"
  VARIANT (762)..(762): /replace="Asn" or "His" or "Ser" or "Thr" or "Tyr" or "Cys" or "Met" or "Trp" or "Ala" or "Ile" or "Leu" or "Phe" or "Val" or "Pro" or "Gly"
  MISC_FEATURE (1)..(844): /note="Variant residues given in the sequence have no preference with respect to those in the annotations for variant positions"
MILDADYITEDGKPIIRIFKKENGEFKVEYDRNFRHYIYALLKDDSQIDEVRKITAERHGKIVRIIDAEKVRKKFLGRPIEVWRLYFEHPQDVPAIRDKIREHSAVIDIFEYDIPFAKRYLIDKGLIPMEGDEELKLLAFDIETLYHEGEEFAKGPIIMISYADEEEAKVITWKKIDLPYVEVVSSEREMIKRFLKVIREKDPDVIITYNGDSFDLPYLVKRAEKLGIKLPLGRDGSEPKMQRLGDMTAVEIKGRIHFDLYHVIRRTINLPTYTLEAVYEAIFGKPKEKVYAHEIAEAWETGKGLERVAKYSMEDAKVTYELGREFFPMEAQLSRLVGQPLWDVSRSSTGNLVEWYLLRKAYERNELAPNKPDEREYERRLRESYAGGYVKEPEKGLWEGLVSLDFRSLYPSIIITHNVSPDTLNREGCREYDVAPEVGHKFCKDFPGFIPSLLKRLLDERQEIKRKMKASKDPIEKKMLDYRQRAIKILANSYYGYYGYAKARWYCKECAESVTAWGREYIEFVRKELEEKFGFKVLYIDTDGLYATIPGAKPEEIKKKALEFVDYINAKLPGLLELEYEGFYVRGFFVTKKKYALIDEEGKIITRGLEIVRRDWSEIAKETQAKVLEAILKHGNVEEAVKIVKEVTEKLSKYEIPPEKLVIYEQITRPLHEYKAIGPHVAVAKRLAARGVKVRPGMVIGYIVLRGDGPISKRAILAEEFDLRKHKYDAEYYIENQVLPAVLRILEAFGYRKEDLRWQKTQQTGLTAWLNIKKKGTGGGGATVKFKYKGEEKEVDISKIKKVWRVGKMISFTYDEGGGKTGRGAVSEKDAPKELLQMLEKQKK

SEQ ID NO: 99 - protein, 844 aa, Artificial Sequence; identical to SEQ ID NO: 98
  source: /note="Description of Artificial Sequence: Synthetic polypeptide"

SEQ ID NO: 100 - protein, 844 aa, Artificial Sequence
  source: /note="Description of Artificial Sequence: Synthetic polypeptide"
  VARIANT (762)..(762): /replace="Asn" or "His" or "Ser" or "Thr" or "Tyr" or "Cys" or "Met" or "Trp" or "Ala" or "Ile" or "Leu" or "Phe" or "Val" or "Pro" or "Gly"
  MISC_FEATURE (1)..(844): /note="Variant residues given in the sequence have no preference with respect to those in the annotations for variant positions"
MILDADYITEDGKPIIRIFKKENGEFKVEYDRNFRHYIYALLKDDSQIDEVRKITAERHGKIVRIIDAEKVRKKFLGRPIEVWRLYFEHPQDVPAIRDKIREHSAVIDIFEYDIPFAKRYLIDKGLIPMEGDEELKLLAFDIETLYHEGEEFAKGPIIMISYADEEEAKVITWKKIDLPYVEVVSSEREMIKRFLKVIREKDPDVIITYNGDSFDLPYLVKRAEKLGIKLPLGRDGSEPKMQRLGDMTAVEIKGRIHFDLYHVIRRTINLPTYTLEAVYEAIFGKPKEKVYAHEIAEAWETGKGLERVAKYSMEDAKVTYELGREFFPMEAQLSRLVGQPLWDVSRSSTGNLVEWYLLRKAYERNELAPNKPDEREYERRLRESYAGGYVKEPEKGLWEGLVSLDFRSLYPSIIITHNVSPDTLNREGCREYDVAPEVGHKFCKDFPGFIPSLLKRLLDERQEIKRKMKASKDPIEKKMLDYRQRAIKILANSYYGYYGYAKARWYCKECAESVTAWGREYIEFVRKELEEKFGFKVLYIDTDGLYATIPGAKPEEIKKKALEFVDYINAKLPGLLELEYEGFYVRGFFVTKKKYALIDEEGKIITRGLEIVRRDWSEIAKETQAKVLEAILKHGNVEEAVKIVKEVTEKLSKYEIPPEKLVIYEQITRPLHEYKAIGPHVAVAKRLAARGVKVRPGMVIGYIVLRGDGPISKRAILAEEFDLRKHKYDAEYYIENQVLPAVLRILEAFGYRKEDLRWQKTQQTGLTAWLNIKKSGTGGGGATVKFKYKGEEKEVDISKIKKVWRVGKMISFTYDEGGGKTGRGAVSEKDAPKELLQMLEKQKK

SEQ ID NO: 101 - protein, 844 aa, Artificial Sequence; identical to SEQ ID NO: 100
  source: /note="Description of Artificial Sequence: Synthetic polypeptide"

SEQ ID NO: 102 - protein, 774 aa, Artificial Sequence
  source: /note="Description of Artificial Sequence: Synthetic polypeptide"
  VARIANT (764)..(764): /replace="Asn" or "His" or "Ser" or "Thr" or "Tyr" or "Cys" or "Met" or "Trp" or "Ala" or "Ile" or "Leu" or "Phe" or "Val" or "Pro" or "Gly"
  MISC_FEATURE (1)..(774): /note="Variant residues given in the sequence have no preference with respect to those in the annotations for variant positions"
MILDTDYITKDGKPIIRIFKKENGEFKIELDPHFQHYIYALLKDDSAIEEIKAIKGERHGKTVRVLDAVKVRKKFLGREVEVWKLIFEHPQDVPAMRGKIREHPAVVDIYEYDIPFAKRYLIDKGLIPMEGDEELKLLAFDIETFYHEGDEFGKGEIIMISYADEEEARVITWKNIDLPYVDVVSNEREMIKRFVQVVKEKDPDVIITYNGDNFDLPYLIKRAEKLGVRLVLGRDKEHPEPKIQRMGDSFAVEIKGRIHFDLFPVVRRTINLPTYTLEAVYEAVLGKTKSKLGAEEIAAIWETEESMKKLAQYSMEDARATYELGKEFFPMEAELAKLIGQSVWDVSRSSTGNLVEWYLLRVAYARNELAPNKPDEEEYKRRLRTTYLGGYVKEPEKGLWENIIYLDFRSLYPSIIVTHNVSPDTLEKEGCKNYDVAPIVGYRFCKDFPGFIPSILGDLIAMRQDIKKKMKSTIDPIEKKMLDYRQRAIKLLANSYYGYMGYPKARWYSKECAESVTAWGRHYIEMTIREIEEKFGFKVLYADTDGFYATIPGEKPELIKKKAKEFLNYINSKLPGLLELEYEGFYLRGFFVTKKRYAVIDEEGRITTRGLEVVRRDWSEIAKETQAKVLEAILKEGSVEKAVEVVRDVVEKIAKYRVPLEKLVIHEQITRDLKDYKAIGPHVAIAKRLAARGIKVKPGTIISYIVLKGSGKISDRVILLTEYDPRKHKYDPDYYIENQVLPAVLRILEAFGYRKEDLRYQSSQQTGLDAWLKR

SEQ ID NO: 103 - protein, 774 aa, Artificial Sequence; identical to SEQ ID NO: 102
  source: /note="Description of Artificial Sequence: Synthetic polypeptide"

SEQ ID NO: 104 - protein, 774 aa, Artificial Sequence
  source: /note="Description of Artificial Sequence: Synthetic polypeptide"
  VARIANT (764)..(764): /replace="Asn" or "His" or "Ser" or "Thr" or "Tyr" or "Cys" or "Met" or "Trp" or "Ala" or "Ile" or "Leu" or "Phe" or "Val" or "Pro" or "Gly"
  MISC_FEATURE (1)..(774): /note="Variant residues given in the sequence have no preference with respect to those in the annotations for variant positions"
MILDTDYITKDGKPIIRIFKKENGEFKIELDPHFQHYIYALLKDDSAIEEIKAIKGERHGKSVRVVDAVKVKKKFLGREVEVWKLIFEHPQDVPAMRDKIKEHPAVIDIYEYDIPFAKRYLIDKGLIPMEGDEELKLLAFDIETFYHEGDEFGKGEIIMISYADEEEARVITWKNIDLPYVDVVSNEREMIKRFVQVVKEKDPDVIITYNGDNFDLPYLIKRAEKLGVRLVLGRDKENPEPKIQRMGDSFAVEIKGRIHFDLFPVVRRTINLPTYTLEAVYEAVLGKTKSKLGAEEIAAIWETEESMKKLAQYSMEDARATYELGKEFFPMEAELAKLIGQSVWDVSRSSTGNLVEWYLLRVAYERNELAPNKPDEEEYKRRLRTTYLGGYVKEPEKGLWENIIYLDFRSLYPSIIVTHNVSPDTLEKEGCENYDIAPIVSYRFCKDFPGFIPSILGDLIAMRQEIKKKMKATIDPVERKMLDYRQRAVKLLANSYYGYMGYPKARWYSKECAESVTAWGRHYIEMTIKEIEEKFGFKVLYADTDGFYATISGEKPEIIKKKAREFLNYINSKLPGLLELEYEGFYLRGFFVTKKRYAVIDEEGRITTRGLEVVRRDWSEIAKETQAKVLEAILKDGSVEKAVEIVRDVLEKIAKYRVPLEKLVIHEQITRDLKDYKAIGPHVAIAKRLAARGIKVKPGTIISYIVLKGSGKISDRVILLTEYDPEKHKYDPDYYIENQVLPAVLRILEAFGYRKEDLRYQSSQQTGLDAWLKR

SEQ ID NO: 105 - protein, 774 aa, Artificial Sequence; identical to SEQ ID NO: 104
  source: /note="Description of Artificial Sequence: Synthetic polypeptide"

SEQ ID NO: 106 - protein, 773 aa, Artificial Sequence
  source: /note="Description of Artificial Sequence: Synthetic polypeptide"
  VARIANT (761)..(761): /replace="Asn" or "His" or "Ser" or "Thr" or "Tyr" or "Cys" or "Met" or "Trp" or "Ala" or "Ile" or "Leu" or "Phe" or "Val" or "Pro" or "Gly"
  MISC_FEATURE (1)..(773): /note="Variant residues given in the sequence have no preference with respect to those in the annotations for variant positions"
MILDTDYITEDGKPVIRIFKKENGEFKIDYDRNFEHYIYALLKDDSAIEDVKKITAERHGTTVRVVRAEKVKKKFLGRPIEVWKLYFTHPQDVPAIRDKIKEHPAVVDIYEYDIPFAKRYLIDKGLIPMEGDEELKMLAFDIETLYHEGEEFAEGPILMISYADEEGARVITWKNIDLPYVDVVSTEKEMIKRFLKVVKEKDPDVLITYNGDNFDFAYLKKRSEKLGVKFILGREGSEPKIQRMGDRFAVEVKGRIHFDLYPVIRRTINLPTYTLEAVYEAIFGQPKEKVYAEEIAQAWETGEGLERVARYSMEDAKVTYELGKEFFPMEAQLSRLVGQSLWDVSRSSTGNLVEWFLLRKAYERNELAPNKPDERELARRRESYAGGYVKEPERGLWENIVYLDFRSLYPSIIITHNVSPDTLNREGCEEYDVAPQVGHKFCKDFPGFIPSLLGDLLEERQKVKKKMKATIDPIEKKLLDYRQRAIKILANSFYGYYGYAKARWYCKECAESVTAWGRQYIETTIREIEEKFGFKVLYADTDGFFATIPGADAETVKKKAKEFLDYINAKLPGLLELEYEGFYKRGFFVTKKKYAVIDEEDKITTRGLEIVRRDWSEIAKETQARVLEAILKHGDVEEAVRIVKEVTEKLSKYEVPPEKLVIYEQITRDLKDYKATGPHVAVAKRLAARGIKIRPGTVISYIVLKGSGRIGDRAIPFDEFDPAKHKYDAEYYIENQVLPAVERILRAFGYRKEDLRYQKTQQVGLGAWLKPKT

SEQ ID NO: 107 - protein, 773 aa, Artificial Sequence; identical to SEQ ID NO: 106
  source: /note="Description of Artificial Sequence: Synthetic polypeptide"

SEQ ID NO: 108 - protein, 774 aa, Artificial Sequence
  source: /note="Description of Artificial Sequence: Synthetic polypeptide"
  VARIANT (761)..(761): /replace="Asn" or "His" or "Ser" or "Thr" or "Tyr" or "Cys" or "Met" or "Trp" or "Ala" or "Ile" or "Leu" or "Phe" or "Val" or "Pro" or "Gly"
  MISC_FEATURE (1)..(774): /note="Variant residues given in the sequence have no preference with respect to those in the annotations for variant positions"
MILDTDYITEDGKPVIRIFKKENGEFKIEYDRTFEHYFYALLKDDSAIEEVKKITAERHGTVVTVKRVEKVQKKFLGRPVEVWKLYFTHPQDVPAIRDKIREHPAVIDIYEYDIPFAKRYLIDKGLVPMEGDEELKMLAFDIETLYHEGEEFAEGPILMISYADEEGARVITWKNVDLPYVDVVSTEREMIKRFLRVVKEKDPDVLITYNGDNFDFAYLKKRCEKLGINFALGRDGSEPKIQRMGDRFAVEVKGRIHFDLYPVIRRTINLPTYTLEAVYEAVFGQPKEKVYAEEITTAWETGENLERVARYSMEDAKVTYELGKEFLPMEAQLSRLIGQSLWDVSRSSTGNLVEWFLLRKAYERNELAPNKPDEKELARRRQSYEGGYVKEPERGLWENIVYLDFRSLYPSIIITHNVSPDTLNREGCKEYDVAPQVGHRFCKDFPGFIPSLLGDLLEERQKIKKKMKATIDPIERKLLDYRQRAIKILANSYYGYYGYARARWYCKECAESVTAWGREYITMTIKEIEEKYGFKVIYSDTDGFFATIPGADAETVKKKAMEFLKYINAKLPGALELEYEGFYKRGFFVTKKKYAVIDEEGKITTRGLEIVRRDWSEIAKETQARVLEALLKDGDVEKAVRIVKEVTEKLSKYEVPPEKLVIHEQITRDLKDYKATGPHVAVAKRLAARGVKIRPGTVISYIVLKGSGRIGDRAIPFDEFDPTKHKYDAEYYIENQVLPAVERILRAFGYRKEDLRYQKTQQVGLSAWLKPKGT

SEQ ID NO: 109 - protein, 774 aa, Artificial Sequence; identical to SEQ ID NO: 108
  source: /note="Description of Artificial Sequence: Synthetic polypeptide"

SEQ ID NO: 110 - protein, 775 aa, Artificial Sequence
  source: /note="Description of Artificial Sequence: Synthetic polypeptide"
  VARIANT (761)..(761): /replace="Asn" or "His" or "Ser" or "Thr" or "Tyr" or "Cys" or "Met" or "Trp" or "Ala" or "Ile" or "Leu" or "Phe" or "Val" or "Pro" or "Gly"
  MISC_FEATURE (1)..(775): /note="Variant residues given in the sequence have no preference with respect to those in the annotations for variant positions"
MILDTDYITENGKPVIRVFKKENGEFKIEYDRTFEHYFYALLKDDSAIEDVKKVTAKRHGTVVKVKRAEKVQKKFLGRPIEVWKLYFNHPQDVPAIRDRIRAHPAVVDIYEYDIPFAKRYLIDKGLIPMEGDEELTMLAFDIETLYHEGEEFGTGPILMISYADGSEARVITWKKIDLPYVDVVSTEKEMIKRFLRVVREKDPDVLITYNGDNFDFAYLKKRCEELGIKFTLGRDGSEPKIQRMGDRFAVEVKGRIHFDLYPVIRRTINLPTYTLEAVYEAVFGKPKEKVYAEEIAQAWESGEGLERVARYSMEDAKVTYELGREFFPMEAQLSRLIGQSLWDVSRSSTGNLVEWFLLRKAYKRNELAPNKPDERELARRRGGYAGGYVKEPERGLWDNIVYLDFRSLYPSIIITHNVSPDTLNREGCKEYDVAPEVGHKFCKDFPGFIPSLLGDLLEERQKIKRKMKATVDPLEKKLLDYRQRAIKILANSFYGYYGYAKARWYCKECAESVTAWGREYIEMVIRELEEKFGFKVLYADTDGLHATIPGADAETVKKKAKEFLKYINPKLPGLLELEYEGFYVRGFFVTKKKYAVIDEEGKITTRGLEIVRRDWSEIAKETQARVLEAILKHGDVEEAVRIVKEVTEKLSKYEVPPEKLVIHEQITRDLRDYKATGPHVAVAKRLAARGVKIRPGTVISYIVLKGSGRIGDRAIPADEFDPTKHRYDAEYYIENQVLPAVERILKAFGYRKEDLRYQKTQQVGLGAWLKVKGKK

SEQ ID NO: 111 - protein, 775 aa, Artificial Sequence; identical to SEQ ID NO: 110
  source: /note="Description of Artificial Sequence: Synthetic polypeptide"

SEQ ID NO: 112 - protein, 783 aa, Artificial Sequence
  source: /note="Description of Artificial Sequence: Synthetic polypeptide"
MRFWPLDATYSVVGGVPEVRVFGVDGEGRRVVLVDRRFRHYFYAKCDKCDASLAKSYLSRVAPVEAVEVVERRFFGRPTIFLKVVAKVPEDVRKLREAALGAPGVVDVYEADIRYYMRYMIDKGVVPCAWNVVEAREAGKLGPLPLYEVVEWAGVEEGFPPPLRVLAFDIEVYNERGSPDPLRDPVVMLAVKTSDGREEVFEAEGRDDRRVIRGFVDFVKEFDPDVIVGYNSNGFDWPYLSERAKALGVPLRVDRLGGVPQQSVYGHWSVVGRANVDLYNIVDEFPEIKVKTLDRVAEYFGVMKRSERVLIPGHKVYEYWNDPAKRPTLMRYVLDDVRSTLGLAEKLLPFLIQLSSVSGLPLDQVAAASVGNRVEWMLLRYAYRMGEVAPNREEREYEPYKGAIVLEPKPGLYSDVLVLDFSSMYPNIMMKYNLSPDTYLEPHEPDPPEGVVVAPEVGHRFRKAPTGFIPAVLKHLVELRRAVREEAKKYPPDSPEYRLLDERQRALKVMANAMYGYLGWVGARWYKKEVAESVTAFARAILLDVVEYAKRLGIEVIYGDTDSLFVKKSGAVDRLVKYVEERHGIEIKVDKDYERVLFTEAKKRYAGLLRDGRIDIVGFEVVRGDWCELAKEVQLNVVELILKSKSVGEARERVVKYVREVVERLKAYKFDLDDLIIWKTLDKELDEYKAYGPHVHAALELKRRGYKVGKGTTVGYVIVRGPGKVSERAMPYIFVDDASKVDVDYYIEKQVIPAALRIAEVLGVKESDLKTGRVQKSLLDFLG

SEQ ID NO: 113 - protein, 785 aa, Artificial Sequence
  source: /note="Description of Artificial Sequence: Synthetic polypeptide"
MKFKLWPLDATYSVVGGVPEVRIFGISESGDRVVVVDRRFRHYFYADCPACDPESVRSQLGRVAPVEEVVAVERRYLGRPRSFLKIVARVPEDVRKLREAAAALPGVSGVYEADIRFYMRYMLDMGVVPCSWNTVDAEATGEKLGNLPVYKVAEWGGVTEGFPPPLRVLAFDIEVYNERGTPDPLRDPVILLAVQASDGRVEVFEASGRDDRSVLRSFIDFVREFDPDVIVGYNSNQFDWPYLAERARALGIPLKVDRVGGAPQQSVYGHWSVTGRANVDLYNIVDEFPEIKLKTLDRVAEYFGVMKREERVLVPGHKIYEYWRDQGKRPLLRQYVIDDVKSTYGLAEKLLPFLIQLSSVSGLPLDQVAAASVGNRVEWMLLRYAYRLGEVAPNREEREYEPYKGAIVLEPRPGLYSDVLALDFSSMYPNIMMKYNLSPDTYLERGEPDPPGGVYVAPEVGHRFRREPPGFIPLVLRQLIELRKRVREELKKYPPDSPEYRVLDERQRALKIMANAMYGYTGWVGARWYKKEVAESVTAFARAILKDVIEYARKAGIVVIYGDTDSLFVKKSGDVEKLVKYVEEKYGIDIKIDKDYSTVLFTEAKKRYAGLLRDGRIDIVGFEVVRGDWSELAKEVQLRVIELILTSRDVSEARQKVVKYVRGVIDKLRNYEVDLDDLIIWKTLDKELDEYKAYPPHVHAAILLKKRGYKVGKGTTIGYVVVKGGEKVSERAVPYIFIDDIEKIDLDYYVERQVIPAALRIAEVIGIKEGDLKTGRSQRTLLDFF

SEQ ID NO: 114 - protein, 766 aa, Artificial Sequence
  source: /note="Description of Artificial Sequence: Synthetic polypeptide"
MILDADYITEEGKPVIRLFKKENGEFKIEHDRTFRHYIYALLKDDSKIEEVKKITAERHGKIVRIVDAEKVEKKFLGRPITVWRLYFEHPQDVPTIREKIREHSAVVDIFEYDIPFAKRYLIDKGLIPMEGDEELKLLAFDIETLYHEGEEFGKGPIIMISYADEEEAKVITWKKIDLPYVEVVSSEREMIKRFLKIIREKDPDIIITYNGDSFDLPYLAKRAEKLGIKLTIGRDGSEPKMQRIGDMTAVEVKGRIHFDLYHVIRRTINLPTYTLEAVYEAIFGKPKEKVYADEIAKAWETGEGLERVAKYSMEDAKATYELGKEFFPMEAQLSRLVGQPLWDVSRSSTGNLVEWFLLRKAYERNELAPNKPDEREYERRLRESYAGGFVKEPEKGLWENIVSLDFRALYPSIIITHNVSPDTLNREGCRNYDVAPEVGHKFCKDFPGFIPSLLKRLLDERQKIKTKMKASQDPIEKIMLDYRQRAIKILANSYYGYYGYAKARWYCKECAESVTAWGREYIEFVWKELEEKFGFKVLYIDTDGLYATIPGGKSEEIKKKALEFVDYINAKLPGLLELEYEGFYKRGFFVTKKKYALIDEEGKIITRGLEIVRRDWSEIAKETQARVLEAILKHGNVEEAVRIVKEVTQKLSKYEIPPEKLAIYEQITRPLHEYKAIGPHVAVAKRLAAKGVKIKPGMVIGYIVLRGDGPISNRAILAEEYDPRKHKYDAEYYIENQVLPAVLRILEGFGYRKEDLRWQKTKQTGL

SEQ ID NO: 115 - protein, 131 aa, Artificial Sequence
  source: /note="Description of Artificial Sequence: Synthetic polypeptide"
MILDADYITEEGKPVIRLFKKENGEFKIEHDRTFRHYIYALLKDDSKIEEVKKITAERHGKIVRIVDAEKVEKKFLGRPITVWRLYFEHPQDVPTIREKIREHSAVVDIFEYDIPFAKRYLIDKGLIPMEG

SEQ ID NO: 116 - protein, 131 aa, Artificial Sequence
  source: /note="Description of Artificial Sequence: Synthetic polypeptide"
MILDVDYITEEGKPVIRLFKKENGKFKIEHDRTFRHYIYALLRDDSKIEEVKKITGERHGKIVRIVDVEKVEKKFLGKPITVWKLYLEHPQDVPTIREKVREHPAVVDIFEYDIPFAKRYLIDKGLIPMEG

SEQ ID NO: 117 - protein, 131 aa, Artificial Sequence
  source: /note="Description of Artificial Sequence: Synthetic polypeptide"
MILDADYITEDGKPIIRIFKKENGEFKVEYDRNFRHYIYALLKDDSQIDEVRKITAERHGKIVRIIDAEKVRKKFLGRPIEVWRLYFEHPQDVPAIRDKIREHSAVIDIFEYDIPFAKRYLIDKGLIPMEG

SEQ ID NO: 118 - protein, 131 aa, Artificial Sequence
  source: /note="Description of Artificial Sequence: Synthetic polypeptide"
MILDTDYITKDGKPIIRIFKKENGEFKIELDPHFQHYIYALLKDDSAIEEIKAIKGERHGKTVRVLDAVKVRKKFLGREVEVWKLIFEHPQDVPAMRGKIREHPAVVDIYEYDIPFAKRYLIDKGLIPMEG

SEQ ID NO: 119 - protein, 131 aa, Artificial Sequence
  source: /note="Description of Artificial Sequence: Synthetic polypeptide"
MILDTDYITEDGKPVIRIFKKENGEFKIDYDRNFEHYIYALLKDDSAIEDVKKITAERHGTTVRVVRAEKVKKKFLGRPIEVWKLYFTHPQDVPAIRDKIKEHPAVVDIYEYDIPFAKRYLIDKGLIPMEG

SEQ ID NO: 120 - protein, 131 aa, Artificial Sequence
  source: /note="Description of Artificial Sequence: Synthetic polypeptide"
MILDTDYITEDGKPVIRIFKKENGEFKIEYDRTFEHYFYALLKDDSAIEEVKKITAERHGTVVTVKRVEKVQKKFLGRPVEVWKLYFTHPQDVPAIRDKIREHPAVIDIYEYDIPFAKRYLIDKGLVPMEG

SEQ ID NO: 121 - protein, 131 aa, Artificial Sequence
  source: /note="Description of Artificial Sequence: Synthetic polypeptide"
MILDTDYITENGKPVIRVFKKENGEFKIEYDRTFEHYFYALLKDDSAIEDVKKVTAKRHGTVVKVKRAEKVQKKFLGRPIEVWKLYFNHPQDVPAIRDRIRAHPAVVDIYEYDIPFAKRYLIDKGLIPMEG

SEQ ID NO: 122 - DNA, 20 bp, Artificial Sequence
  source: /note="Description of Artificial Sequence: Synthetic oligonucleotide"
acctgggaggcttttctgta

SEQ ID NO: 123 - DNA, 24 bp, Artificial Sequence
  source: /note="Description of Artificial Sequence: Synthetic oligonucleotide"
gtttatggaggtcctcttgtgtcc

SEQ ID NO: 124 - DNA, 21 bp, Artificial Sequence
  source: /note="Description of Artificial Sequence: Synthetic oligonucleotide"
gggtcaacgctaggctggcag

SEQ ID NO: 125 - DNA, 20 bp, Artificial Sequence
  source: /note="Description of Artificial Sequence: Synthetic oligonucleotide"
tctggacgggcatctcaagt

SEQ ID NO: 126 - DNA, 20 bp, Artificial Sequence
  source: /note="Description of Artificial Sequence: Synthetic oligonucleotide"
ttcacaggaagcactcacca

SEQ ID NO: 127 - protein, 775 aa, Artificial Sequence
  source: /note="Description of Artificial Sequence: Synthetic polypeptide"
  MOD_RES (36)..(36): Any amino acid other than Pro
  VARIANT (762)..(762): /replace="Asn" or "His" or "Ser" or "Thr" or "Tyr" or "Cys" or "Met" or "Trp" or "Ala" or "Ile" or "Leu" or "Phe" or "Val" or "Pro" or "Gly"
  MISC_FEATURE (1)..(775): /note="Variant residues given in the sequence have no preference with respect to those in the annotations for variant positions"
MILDVDYITEEGKPVIRLFKKENGKFKIEHDRTFRXYIYALLRDDSKIEEVKKITGERHGKIVRIVDVEKVEKKFLGKPITVWKLYLEHPQDVPTIREKVREHPAVVDIFEYDIPFAKRYLIDKGLIPMEGEEELKILAFDIETLYHEGEEFGKGPIIMISYADENEAKVITWKNIDLPYVEVVSSEREMIKRFLRIIREKDPDIIVTYNGDSFDFPYLAKRAEKLGIKLTIGRDGSEPKMQRIGDMTAVEVKGRIHFDLYHVITRTINLPTYTLEAVYEAIFGKPKEKVYADEIAKAWESGENLERVAKYSMEDAKATYELGKEFLPMEIQLSRLVGQPLWDVSRSSTGNLVEWFLLRKAYERNEVAPNKPSEEEYQRRLRESYTGGFVKEPEKGLWENIVYLDFRALYPSIIITHNVSPDTLNLEGCKNYDIAPQVGHKFCKDIPGFIPSLLGHLLEERQKIKTKMKETQDPIEKILLDYRQKAIKLLANSFYGYYGYAKARWYCKECAESVTAWGRKYIELVWKELEEKFGFKVLYIDTDGLYATIPGGESEEIKKKALEFVKYINSKLPGLLELEYEGFYKRGFFVTKKRYAVIDEEGKVITRGLEIVRRDWSEIAKETQARVLETILKHGDVEEAVRIVKEVIQKLANYEIPPEKLAIYEQITRPLHEYKAIGPHVAVAKKLAAKGVKIKPGMVIGYIVLRGDGPISNRAILAEEYDPKKHKYDAEYYIENQVLPAVLRILEGFGYRKEDLRYQKTQQVGLTSWLNIKKS

SEQ ID NO: 128 - protein, 775 aa, Artificial Sequence; identical to SEQ ID NO: 127
  source: /note="Description of Artificial Sequence: Synthetic polypeptide"
  MOD_RES (36)..(36): Any amino acid other than Pro

SEQ ID NO: 129 - protein, 775 aa, Artificial Sequence
  source: /note="Description of Artificial Sequence: Synthetic polypeptide"
  MOD_RES (36)..(36): Any amino acid other than Pro
  VARIANT (762)..(762): /replace="Asn" or "His" or "Ser" or "Thr" or "Tyr" or "Cys" or "Met" or "Trp" or "Ala" or "Ile" or "Leu" or "Phe" or "Val" or "Pro" or "Gly"
  MISC_FEATURE (1)..(775): /note="Variant residues given in the sequence have no preference with respect to those in the annotations for variant positions"
MILDVDYITEEGKPVIRLFKKENGKFKIEHDRTFRXYIYALLRDDSKIEEVKKITGERHGKIVRIVDVEKVEKKFLGKPITVWKLYLEHPQDVPTIREKVREHPAVVDIFEYDIPFAKRYLIDKGLIPMEGEEELKILAFDIETLYHEGEEFGKGPIIMISYADENEAKVITWKNIDLPYVEVVSSEREMIKRFLRIIREKDPDIIVTYNGDSFDFPYLAKRAEKLGIKLTIGRDGSEPKMQRIGDMTAVEVKGRIHFDLYHVITRTINLPTYTLEAVYEAIFGKPKEKVYADEIAKAWESGENLERVAKYSMEDAKATYELGKEFLPMEIQLSRLVGQPLWDVSRSSTGNLVEWFLLRKAYERNEVAPNKPSEEEYQRRLRESYTGGFVKEPEKGLWENIVYLDFRSLYPSIIITHNVSPDTLNLEGCKNYDIAPQVGHKFCKDIPGFIPSLLGHLLEERQKIKTKMKETQDPIEKILLDYRQKAIKLLANSFYGYYGYAKARWYCKECAESVTAWGRKYIELVWKELEEKFGFKVLYIDTDGLYATIPGGESEEIKKKALEFVKYINSKLPGLLELEYEGFYKRGFFVTKKRYAVIDEEGKVITRGLEIVRRDWSEIAKETQARVLETILKHGDVEEAVRIVKEVIQKLANYEIPPEKLAIYEQITRPLHEYKAIGPHVAVAKKLAAKGVKIKPGMVIGYIVLRGDGPISNRAILAEEYDPKKHKYDAEYYIENQVLPAVLRILEGFGYRKEDLRYQKTQQVGLTSWLNIKKS

SEQ ID NO: 130 - protein, 775 aa, Artificial Sequence; identical to SEQ ID NO: 129
  source: /note="Description of Artificial Sequence: Synthetic polypeptide"
  MOD_RES (36)..(36): Any amino acid other than Pro

SEQ ID NO: 131 - protein, 844 aa, Artificial Sequence
  source: /note="Description of Artificial Sequence: Synthetic polypeptide"
  MOD_RES (36)..(36): Any amino acid other than Pro
  VARIANT (762)..(762): /replace="Asn" or "His" or "Ser" or "Thr" or "Tyr" or "Cys" or "Met" or "Trp" or "Ala" or "Ile" or "Leu" or "Phe" or "Val" or "Pro" or "Gly"
  MISC_FEATURE (1)..(844): /note="Variant residues given in the sequence have no preference with respect to those in the annotations for variant positions"
MILDVDYITEEGKPVIRLFKKENGKFKIEHDRTFRXYIYALLRDDSKIEEVKKITGERHGKIVRIVDVEKVEKKFLGKPITVWKLYLEHPQDVPTIREKVREHPAVVDIFEYDIPFAKRYLIDKGLIPMEGEEELKILAFDIETLYHEGEEFGKGPIIMISYADENEAKVITWKNIDLPYVEVVSSEREMIKRFLRIIREKDPDIIVTYNGDSFDFPYLAKRAEKLGIKLTIGRDGSEPKMQRIGDMTAVEVKGRIHFDLYHVITRTINLPTYTLEAVYEAIFGKPKEKVYADEIAKAWESGENLERVAKYSMEDAKATYELGKEFLPMEIQLSRLVGQPLWDVSRSSTGNLVEWFLLRKAYERNEVAPNKPSEEEYQRRLRESYTGGFVKEPEKGLWENIVYLDFRALYPSIIITHNVSPDTLNLEGCKNYDIAPQVGHKFCKDIPGFIPSLLGHLLEERQKIKTKMKETQDPIEKILLDYRQKAIKLLANSFYGYYGYAKARWYCKECAESVTAWGRKYIELVWKELEEKFGFKVLYIDTDGLYATIPGGESEEIKKKALEFVKYINSKLPGLLELEYEGFYKRGFFVTKKRYAVIDEEGKVITRGLEIVRRDWSEIAKETQARVLETILKHGDVEEAVRIVKEVIQKLANYEIPPEKLAIYEQITRPLHEYKAIGPHVAVAKKLAAKGVKIKPGMVIGYIVLRGDGPISNRAILAEEYDPKKHKYDAEYYIENQVLPAVLRILEGFGYRKEDLRYQKTQQVGLTSWLNIKKSGTGGGGATVKFKYKGEEKEVDISKIKKVWRVGKMISFTYDEGGGKTGRGAVSEKDAPKELLQMLEKQKK

SEQ ID NO: 132 - protein, 844 aa, Artificial Sequence; identical to SEQ ID NO: 131
  source: /note="Description of Artificial Sequence: Synthetic polypeptide"
  MOD_RES (36)..(36): Any amino acid other than Pro

SEQ ID NO: 133 - protein, 844 aa, Artificial Sequence
  source: /note="Description of Artificial Sequence: Synthetic polypeptide"
  MOD_RES (36)..(36): Any amino acid other than Pro
  VARIANT (762)..(762): /replace="Asn" or "His" or "Ser" or "Thr" or "Tyr" or "Cys" or "Met" or "Trp" or "Ala" or "Ile" or "Leu" or "Phe" or "Val" or "Pro" or "Gly"
  MISC_FEATURE (1)..(844): /note="Variant residues given in the sequence have no preference with respect to those in the annotations for variant positions"
MILDVDYITEEGKPVIRLFKKENGKFKIEHDRTFRXYIYALLRDDSKIEEVKKITGERHGKIVRIVDVEKVEKKFLGKPITVWKLYLEHPQDVPTIREKVREHPAVVDIFEYDIPFAKRYLIDKGLIPMEGEEELKILAFDIETLYHEGEEFGKGPIIMISYADENEAKVITWKNIDLPYVEVVSSEREMIKRFLRIIREKDPDIIVTYNGDSFDFPYLAKRAEKLGIKLTIGRDGSEPKMQRIGDMTAVEVKGRIHFDLYHVITRTINLPTYTLEAVYEAIFGKPKEKVYADEIAKAWESGENLERVAKYSMEDAKATYELGKEFLPMEIQLSRLVGQPLWDVSRSSTGNLVEWFLLRKAYERNEVAPNKPSEEEYQRRLRESYTGGFVKEPEKGLWENIVYLDFRSLYPSIIITHNVSPDTLNLEGCKNYDIAPQVGHKFCKDIPGFIPSLLGHLLEERQKIKTKMKETQDPIEKILLDYRQKAIKLLANSFYGYYGYAKARWYCKECAESVTAWGRKYIELVWKELEEKFGFKVLYIDTDGLYATIPGGESEEIKKKALEFVKYINSKLPGLLELEYEGFYKRGFFVTKKRYAVIDEEGKVITRGLEIVRRDWSEIAKETQARVLETILKHGDVEEAVRIVKEVIQKLANYEIPPEKLAIYEQITRPLHEYKAIGPHVAVAKKLAAKGVKIKPGMVIGYIVLRGDGPISNRAILAEEYDPKKHKYDAEYYIENQVLPAVLRILEGFGYRKEDLRYQKTQQVGLTSWLNIKKSGTGGGGATVKFKYKGEEKEVDISKIKKVWRVGKMISFTYDEGGGKTGRGAVSEKDAPKELLQMLEKQKK

SEQ ID NO: 134 - protein, 844 aa, Artificial Sequence; identical to SEQ ID NO: 133
  source: /note="Description of Artificial Sequence: Synthetic polypeptide"
  MOD_RES (36)..(36): Any amino acid other than Pro

SEQ ID NO: 135 - protein, 766 aa, Artificial Sequence
  source: /note="Description of Artificial Sequence: Synthetic polypeptide"
  MOD_RES (36)..(36): Any amino acid other than Pro
  VARIANT (762)..(762): /replace="Asn" or "His" or "Ser" or "Thr" or "Tyr" or "Cys" or "Met" or "Trp" or "Ala" or "Ile" or "Leu" or "Phe" or "Val" or "Pro" or "Gly"
  MISC_FEATURE (1)..(766): /note="Variant residues given in the sequence have no preference with respect to those in the annotations for variant positions"
MILDADYITEEGKPVIRLFKKENGEFKIEHDRTFRXYIYALLKDDSKIEEVKKITAERHGKIVRIVDAEKVEKKFLGRPITVWRLYFEHPQDVPTIREKIREHSAVVDIFEYDIPFAKRYLIDKGLIPMEGDEELKLLAFDIETLYHEGEEFGKGPIIMISYADEEEAKVITWKKIDLPYVEVVSSEREMIKRFLKIIREKDPDIIITYNGDSFDLPYLAKRAEKLGIKLTIGRDGSEPKMQRIGDMTAVEVKGRIHFDLYHVIRRTINLPTYTLEAVYEAIFGKPKEKVYADEIAKAWETGEGLERVAKYSMEDAKATYELGKEFFPMEAQLSRLVGQPLWDVSRSSTGNLVEWFLLRKAYERNELAPNKPDEREYERRLRESYAGGFVKEPEKGLWENIVSLDFRALYPSIIITHNVSPDTLNREGCRNYDVAPEVGHKFCKDFPGFIPSLLKRLLDERQKIKTKMKASQDPIEKIMLDYRQRAIKILANSYYGYYGYAKARWYCKECAESVTAWGREYIEFVWKELEEKFGFKVLYIDTDGLYATIPGGKSEEIKKKALEFVDYINAKLPGLLELEYEGFYKRGFFVTKKKYALIDEEGKIITRGLEIVRRDWSEIAKETQARVLEAILKHGNVEEAVRIVKEVTQKLSKYEIPPEKLAIYEQITRPLHEYKAIGPHVAVAKRLAAKGVKIKPGMVIGYIVLRGDGPISNRAILAEEYDPRKHKYDAEYYIENQVLPAVLRILEGFGYRKEDLRWQKTQQTGL

SEQ ID NO: 136 - protein, 766 aa, Artificial Sequence
  source: /note="Description of Artificial Sequence: Synthetic polypeptide"
  MOD_RES (36)..(36): Any amino acid other than Pro
  VARIANT (762)..(762): /replace="Asn" or "His" or "Ser" or "Thr" or "Tyr" or "Cys" or "Met" or "Trp" or "Ala" or "Ile" or "Leu" or "Phe" or "Val" or "Pro" or "Gly"
  MISC_FEATURE (1)..(766): /note="Variant residues given in the sequence have no preference with respect to those in the annotations for variant positions"
MILDADYITEEGKPVIRLFKKENGEFKIEHDRTFRXYIYALLKDDSKIEEVKKITAERHGKIVRIVDAEKVEKKFLGRPITVWRLYFEHPQDVPTIREKIREHSAVVDIFEYDIPFAKRYLIDKGLIPMEGDEELKLLAFDIETLYHEGEEFGKGPIIMISYADEEEAKVITWKKIDLPYVEVVSSEREMIKRFLKIIREKDPDIIITYNGDSFDLPYLAKRAEKLGIKLTIGRDGSEPKMQRIGDMTAVEVKGRIHFDLYHVIRRTINLPTYTLEAVYEAIFGKPKEKVYADEIAKAWETGEGLERVAKYSMEDAKATYELGKEFFPMEAQLSRLVGQPLWDVSRSSTGNLVEWFLLRKAYERNELAPNKPDEREYERRLRESYAGGFVKEPEKGLWENIVSLDFRSLYPSIIITHNVSPDTLNREGCRNYDVAPEVGHKFCKDFPGFIPSLLKRLLDERQKIKTKMKASQDPIEKIMLDYRQRAIKILANSYYGYYGYAKARWYCKECAESVTAWGREYIEFVWKELEEKFGFKVLYIDTDGLYATIPGGKSEEIKKKALEFVDYINAKLPGLLELEYEGFYKRGFFVTKKKYALIDEEGKIITRGLEIVRRDWSEIAKETQARVLEAILKHGNVEEAVRIVKEVTQKLSKYEIPPEKLAIYEQITRPLHEYKAIGPHVAVAKRLAAKGVKIKPGMVIGYIVLRGDGPISNRAILAEEYDPRKHKYDAEYYIENQVLPAVLRILEGFGYRKEDLRWQKTQQTGL

SEQ ID NO: 137 - protein, 766 aa, Artificial Sequence; identical to SEQ ID NO: 135
  source: /note="Description of Artificial Sequence: Synthetic polypeptide"
  MOD_RES (36)..(36): Any amino acid other than Pro

SEQ ID NO: 138 - protein, 766 aa, Artificial Sequence; identical to SEQ ID NO: 136
  source: /note="Description of Artificial Sequence: Synthetic polypeptide"
  MOD_RES (36)..(36): Any amino acid other than Pro

SEQ ID NO: 139 - protein, 844 aa, Artificial Sequence
  source: /note="Description of Artificial Sequence: Synthetic polypeptide"
  MOD_RES (36)..(36): Any amino acid other than Pro
  VARIANT (762)..(762): /replace="Asn" or "His" or "Ser" or "Thr" or "Tyr" or "Cys" or "Met" or "Trp" or "Ala" or "Ile" or "Leu" or "Phe" or "Val" or "Pro" or "Gly"
  MISC_FEATURE (1)..(844): /note="Variant residues given in the sequence have no preference with respect to those in the annotations for variant positions"
MILDADYITEEGKPVIRLFKKENGEFKIEHDRTFRXYIYALLKDDSKIEEVKKITAERHGKIVRIVDAEKVEKKFLGRPITVWRLYFEHPQDVPTIREKIREHSAVVDIFEYDIPFAKRYLIDKGLIPMEGDEELKLLAFDIETLYHEGEEFGKGPIIMISYADEEEAKVITWKKIDLPYVEVVSSEREMIKRFLKIIREKDPDIIITYNGDSFDLPYLAKRAEKLGIKLTIGRDGSEPKMQRIGDMTAVEVKGRIHFDLYHVIRRTINLPTYTLEAVYEAIFGKPKEKVYADEIAKAWETGEGLERVAKYSMEDAKATYELGKEFFPMEAQLSRLVGQPLWDVSRSSTGNLVEWFLLRKAYERNELAPNKPDEREYERRLRESYAGGFVKEPEKGLWENIVSLDFRALYPSIIITHNVSPDTLNREGCRNYDVAPEVGHKFCKDFPGFIPSLLKRLLDERQKIKTKMKASQDPIEKIMLDYRQRAIKILANSYYGYYGYAKARWYCKECAESVTAWGREYIEFVWKELEEKFGFKVLYIDTDGLYATIPGGKSEEIKKKALEFVDYINAKLPGLLELEYEGFYKRGFFVTKKKYALIDEEGKIITRGLEIVRRDWSEIAKETQARVLEAILKHGNVEEAVRIVKEVTQKLSKYEIPPEKLAIYEQITRPLHEYKAIGPHVAVAKRLAAKGVKIKPGMVIGYIVLRGDGPISNRAILAEEYDPRKHKYDAEYYIENQVLPAVLRILEGFGYRKEDLRWQKTQQTGLTSWLNIKKSGTGGGGATVKFKYKGEEKEVDISKIKKVWRVGKMISFTYDEGGGKTGRGAVSEKDAPKELLQMLEKQKK

SEQ ID NO: 140 - protein, 844 aa, Artificial Sequence; identical to SEQ ID NO: 139
  source: /note="Description of Artificial Sequence: Synthetic polypeptide"
  MOD_RES (36)..(36): Any amino acid other than Pro

SEQ ID NO: 141 - protein, 844 aa, Artificial Sequence
  source: /note="Description of Artificial Sequence: Synthetic polypeptide"
  MOD_RES (36)..(36): Any amino acid other than Pro
  VARIANT (762)..(762): /replace="Asn" or "His" or "Ser" or "Thr" or "Tyr" or "Cys" or "Met" or "Trp" or "Ala" or "Ile" or "Leu" or "Phe" or "Val" or "Pro" or "Gly"
  MISC_FEATURE (1)..(844): /note="Variant residues given in the sequence have no preference with respect to those in the annotations for variant positions"
MILDADYITEEGKPVIRLFKKENGEFKIEHDRTFRXYIYALLKDDSKIEEVKKITAERHGKIVRIVDAEKVEKKFLGRPITVWRLYFEHPQDVPTIREKIREHSAVVDIFEYDIPFAKRYLIDKGLIPMEGDEELKLLAFDIETLYHEGEEFGKGPIIMISYADEEEAKVITWKKIDLPYVEVVSSEREMIKRFLKIIREKDPDIIITYNGDSFDLPYLAKRAEKLGIKLTIGRDGSEPKMQRIGDMTAVEVKGRIHFDLYHVIRRTINLPTYTLEAVYEAIFGKPKEKVYADEIAKAWETGEGLERVAKYSMEDAKATYELGKEFFPMEAQLSRLVGQPLWDVSRSSTGNLVEWFLLRKAYERNELAPNKPDEREYERRLRESYAGGFVKEPEKGLWENIVSLDFRSLYPSIIITHNVSPDTLNREGCRNYDVAPEVGHKFCKDFPGFIPSLLKRLLDERQKIKTKMKASQDPIEKIMLDYRQRAIKILANSYYGYYGYAKARWYCKECAESVTAWGREYIEFVWKELEEKFGFKVLYIDTDGLYATIPGGKSEEIKKKALEFVDYINAKLPGLLELEYEGFYKRGFFVTKKKYALIDEEGKIITRGLEIVRRDWSEIAKETQARVLEAILKHGNVEEAVRIVKEVTQKLSKYEIPPEKLAIYEQITRPLHEYKAIGPHVAVAKRLAAKGVKIKPGMVIGYIVLRGDGPISNRAILAEEYDPRKHKYDAEYYIENQVLPAVLRILEGFGYRKEDLRWQKTQQTGLTSWLNIKKSGTGGGGATVKFKYKGEEKEVDISKIKKVWRVGKMISFTYDEGGGKTGRGAVSEKDAPKELLQMLEKQKK

SEQ ID NO: 142 - protein, 844 aa, Artificial Sequence; identical to SEQ ID NO: 141
  source: /note="Description of Artificial Sequence: Synthetic polypeptide"
  MOD_RES (36)..(36): Any amino acid other than Pro

SEQ ID NO: 143 - protein, 775 aa, Artificial Sequence
  source: /note="Description of Artificial Sequence: Synthetic polypeptide"
  MOD_RES (36)..(36): Any amino acid other than Pro
  VARIANT (762)..(762): /replace="Asn" or "His" or "Ser" or "Thr" or "Tyr" or "Cys" or "Met" or "Trp" or "Ala" or "Ile" or "Leu" or "Phe" or "Val" or "Pro" or "Gly"
  MISC_FEATURE (1)..(775): /note="Variant residues given in the sequence have no preference with respect to those in the annotations for variant positions"
MILDADYITEDGKPIIRIFKKENGEFKVEYDRNFRXYIYALLKDDSQIDEVRKITAERHGKIVRIIDAEKVRKKFLGRPIEVWRLYFEHPQDVPAIRDKIREHSAVIDIFEYDIPFAKRYLIDKGLIPMEGDEELKLLAFDIETLYHEGEEFAKGPIIMISYADEEEAKVITWKKIDLPYVEVVSSEREMIKRFLKVIREKDPDVIITYNGDSFDLPYLVKRAEKLGIKLPLGRDGSEPKMQRLGDMTAVEIKGRIHFDLYHVIRRTINLPTYTLEAVYEAIFGKPKEKVYAHEIAEAWETGKGLERVAKYSMEDAKVTYELGREFFPMEAQLSRLVGQPLWDVSRSSTGNLVEWYLLRKAYERNELAPNKPDEREYERRLRESYAGGYVKEPEKGLWEGLVSLDFRSLYPSIIITHNVSPDTLNREGCREYDVAPEVGHKFCKDFPGFIPSLLKRLLDERQEIKRKMKASKDPIEKKMLDYRQRAIKILANSYYGYYGYAKARWYCKECAESVTAWGREYIEFVRKELEEKFGFKVLYIDTDGLYATIPGAKPEEIKKKALEFVDYINAKLPGLLELEYEGFYVRGFFVTKKKYALIDEEGKIITRGLEIVRRDWSEIAKETQAKVLEAILKHGNVEEAVKIVKEVTEKLSKYEIPPEKLVIYEQITRPLHEYKAIGPHVAVAKRLAARGVKVRPGMVIGYIVLRGDGPISKRAILAEEFDLRKHKYDAEYYIENQVLPAVLRILEAFGYRKEDLRWQKTQQTGLTAWLNIKKK

SEQ ID NO: 144 - protein, 775 aa, Artificial Sequence; identical to SEQ ID NO: 143
  source: /note="Description of Artificial Sequence: Synthetic polypeptide"
  MOD_RES (36)..(36): Any amino acid other than Pro

SEQ ID NO: 145 - protein, 844 aa, Artificial Sequence
  source: /note="Description of Artificial Sequence: Synthetic polypeptide"
  MOD_RES (36)..(36): Any amino acid other than Pro
  VARIANT (762)..(762): /replace="Asn" or "His" or "Ser" or "Thr" or "Tyr" or "Cys" or "Met" or "Trp" or "Ala" or "Ile" or "Leu" or "Phe" or "Val" or "Pro" or "Gly"
  MISC_FEATURE (1)..(844): /note="Variant residues given in the sequence have no preference with respect to those in the annotations for variant positions"
MILDADYITEDGKPIIRIFKKENGEFKVEYDRNFRXYIYALLKDDSQIDEVRKITAERHGKIVRIIDAEKVRKKFLGRPIEVWRLYFEHPQDVPAIRDKIREHSAVIDIFEYDIPFAKRYLIDKGLIPMEGDEELKLLAFDIETLYHEGEEFAKGPIIMISYADEEEAKVITWKKIDLPYVEVVSSEREMIKRFLKVIREKDPDVIITYNGDSFDLPYLVKRAEKLGIKLPLGRDGSEPKMQRLGDMTAVEIKGRIHFDLYHVIRRTINLPTYTLEAVYEAIFGKPKEKVYAHEIAEAWETGKGLERVAKYSMEDAKVTYELGREFFPMEAQLSRLVGQPLWDVSRSSTGNLVEWYLLRKAYERNELAPNKPDEREYERRLRESYAGGYVKEPEKGLWEGLVSLDFRSLYPSIIITHNVSPDTLNREGCREYDVAPEVGHKFCKDFPGFIPSLLKRLLDERQEIKRKMKASKDPIEKKMLDYRQRAIKILANSYYGYYGYAKARWYCKECAESVTAWGREYIEFVRKELEEKFGFKVLYIDTDGLYATIPGAKPEEIKKKALEFVDYINAKLPGLLELEYEGFYVRGFFVTKKKYALIDEEGKIITRGLEIVRRDWSEIAKETQAKVLEAILKHGNVEEAVKIVKEVTEKLSKYEIPPEKLVIYEQITRPLHEYKAIGPHVAVAKRLAARGVKVRPGMVIGYIVLRGDGPISKRAILAEEFDLRKHKYDAEYYIENQVLPAVLRILEAFGYRKEDLRWQKTQQTGLTAWLNIKKKGTGGGGATVKFKYKGEEKEVDISKIKKVWRVGKMISFTYDEGGGKTGRGAVSEKDAPKELLQMLEKQKK

SEQ ID NO: 146 - protein, 844 aa, Artificial Sequence; identical to SEQ ID NO: 145
  source: /note="Description of Artificial Sequence: Synthetic polypeptide"
  MOD_RES (36)..(36): Any amino acid other than Pro

SEQ ID NO: 147 - protein, 844 aa, Artificial Sequence
  source: /note="Description of Artificial Sequence: Synthetic polypeptide"
  MOD_RES (36)..(36): Any amino acid other than Pro
  VARIANT (762)..(762): /replace="Asn" or "His" or "Ser" or "Thr" or "Tyr" or "Cys" or "Met" or "Trp" or "Ala" or "Ile" or "Leu" or "Phe" or "Val" or "Pro" or "Gly"
  MISC_FEATURE (1)..(844): /note="Variant residues given in the sequence have no preference with respect to those in the annotations for variant positions"
MILDADYITEDGKPIIRIFKKENGEFKVEYDRNFRXYIYALLKDDSQIDEVRKITAERHGKIVRIIDAEKVRKKFLGRPIEVWRLYFEHPQDVPAIRDKIREHSAVIDIFEYDIPFAKRYLIDKGLIPMEGDEELKLLAFDIETLYHEGEEFAKGPIIMISYADEEEAKVITWKKIDLPYVEVVSSEREMIKRFLKVIREKDPDVIITYNGDSFDLPYLVKRAEKLGIKLPLGRDGSEPKMQRLGDMTAVEIKGRIHFDLYHVIRRTINLPTYTLEAVYEAIFGKPKEKVYAHEIAEAWETGKGLERVAKYSMEDAKVTYELGREFFPMEAQLSRLVGQPLWDVSRSSTGNLVEWYLLRKAYERNELAPNKPDEREYERRLRESYAGGYVKEPEKGLWEGLVSLDFRSLYPSIIITHNVSPDTLNREGCREYDVAPEVGHKFCKDFPGFIPSLLKRLLDERQEIKRKMKASKDPIEKKMLDYRQRAIKILANSYYGYYGYAKARWYCKECAESVTAWGREYIEFVRKELEEKFGFKVLYIDTDGLYATIPGAKPEEIKKKALEFVDYINAKLPGLLELEYEGFYVRGFFVTKKKYALIDEEGKIITRGLEIVRRDWSEIAKETQAKVLEAILKHGNVEEAVKIVKEVTEKLSKYEIPPEKLVIYEQITRPLHEYKAIGPHVAVAKRLAARGVKVRPGMVIGYIVLRGDGPISKRAILAEEFDLRKHKYDAEYYIENQVLPAVLRILEAFGYRKEDLRWQKTQQTGLTAWLNIKKSGTGGGGATVKFKYKGEEKEVDISKIKKVWRVGKMISFTYDEGGGKTGRGAVSEKDAPKELLQMLEKQKK

SEQ ID NO: 148 - protein, 844 aa, Artificial Sequence; identical to SEQ ID NO: 147
  source: /note="Description of Artificial Sequence: Synthetic polypeptide"
  MOD_RES (36)..(36): Any amino acid other than Pro

SEQ ID NO: 149 - protein, 774 aa, Artificial Sequence
  source: /note="Description of Artificial Sequence: Synthetic polypeptide"
  MOD_RES (36)..(36): Any amino acid other than Pro
  VARIANT (764)..(764): /replace="Asn" or "His" or "Ser" or "Thr" or "Tyr" or "Cys" or "Met" or "Trp" or "Ala" or "Ile" or "Leu" or "Phe" or "Val" or "Pro" or "Gly"
  MISC_FEATURE (1)..(774): /note="Variant residues given in the sequence have no preference with respect to those in the annotations for variant positions"
MILDTDYITKDGKPIIRIFKKENGEFKIELDPHFQXYIYALLKDDSAIEEIKAIKGERHGKTVRVLDAVKVRKKFLGREVEVWKLIFEHPQDVPAMRGKIREHPAVVDIYEYDIPFAKRYLIDKGLIPMEGDEELKLLAFDIETFYHEGDEFGKGEIIMISYADEEEARVITWKNIDLPYVDVVSNEREMIKRFVQVVKEKDPDVIITYNGDNFDLPYLIKRAEKLGVRLVLGRDKEHPEPKIQRMGDSFAVEIKGRIHFDLFPVVRRTINLPTYTLEAVYEAVLGKTKSKLGAEEIAAIWETEESMKKLAQYSMEDARATYELGKEFFPMEAELAKLIGQSVWDVSRSSTGNLVEWYLLRVAYARNELAPNKPDEEEYKRRLRTTYLGGYVKEPEKGLWENIIYLDFRSLYPSIIVTHNVSPDTLEKEGCKNYDVAPIVGYRFCKDFPGFIPSILGDLIAMRQDIKKKMKSTIDPIEKKMLDYRQRAIKLLANSYYGYMGYPKARWYSKECAESVTAWGRHYIEMTIREIEEKFGFKVLYADTDGFYATIPGEKPELIKKKAKEFLNYINSKLPGLLELEYEGFYLRGFFVTKKRYAVIDEEGRITTRGLEVVRRDWSEIAKETQAKVLEAILKEGSVEKAVEVVRDVVEKIAKYRVPLEKLVIHEQITRDLKDYKAIGPHVAIAKRLAARGIKVKPGTIISYIVLKGSGKISDRVILLTEYDPRKHKYDPDYYIENQVLPAVLRILEAFGYRKEDLRYQSSQQTGLDAWLKR

SEQ ID NO: 150 - protein, 774 aa, Artificial Sequence; identical to SEQ ID NO: 149
  source: /note="Description of Artificial Sequence: Synthetic polypeptide"
  MOD_RES (36)..(36): Any amino acid other than Pro

SEQ ID NO: 151 - protein, 774 aa, Artificial Sequence
  source: /note="Description of Artificial Sequence: Synthetic polypeptide"
  MOD_RES (36)..(36): Any amino acid other than Pro
  VARIANT (764)..(764): /replace="Asn" or "His" or "Ser" or "Thr" or "Tyr" or "Cys" or "Met" or "Trp" or "Ala" or "Ile" or "Leu" or "Phe" or "Val" or "Pro" or "Gly"
  MISC_FEATURE (1)..(774): /note="Variant residues given in the sequence have no preference with respect to those in the annotations for variant positions"
MILDTDYITKDGKPIIRIFKKENGEFKIELDPHFQXYIYALLKDDSAIEEIKAIKGERHGKSVRVVDAVKVKKKFLGREVEVWKLIFEHPQDVPAMRDKIKEHPAVIDIYEYDIPFAKRYLIDKGLIPMEGDEELKLLAFDIETFYHEGDEFGKGEIIMISYADEEEARVITWKNIDLPYVDVVSNEREMIKRFVQVVKEKDPDVIITYNGDNFDLPYLIKRAEKLGVRLVLGRDKENPEPKIQRMGDSFAVEIKGRIHFDLFPVVRRTINLPTYTLEAVYEAVLGKTKSKLGAEEIAAIWETEESMKKLAQYSMEDARATYELGKEFFPMEAELAKLIGQSVWDVSRSSTGNLVEWYLLRVAYERNELAPNKPDEEEYKRRLRTTYLGGYVKEPEKGLWENIIYLDFRSLYPSIIVTHNVSPDTLEKEGCENYDIAPIVSYRFCKDFPGFIPSILGDLIAMRQEIKKKMKATIDPVERKMLDYRQRAVKLLANSYYGYMGYPKARWYSKECAESVTAWGRHYIEMTIKEIEEKFGFKVLYADTDGFYATISGEKPEIIKKKAREFLNYINSKLPGLLELEYEGFYLRGFFVTKKRYAVIDEEGRITTRGLEVVRRDWSEIAKETQAKVLEAILKDGSVEKAVEIVRDVLEKIAKYRVPLEKLVIHEQITRDLKDYKAIGPHVAIAKRLAARGIKVKPGTIISYIVLKGSGKISDRVILLTEYDPEKHKYDPDYYIENQVLPAVLRILEAFGYRKEDLRYQSSQQTGLDAWLKR

SEQ ID NO: 152 - protein, 774 aa, Artificial Sequence; identical to SEQ ID NO: 151
  source: /note="Description of Artificial Sequence: Synthetic polypeptide"
  MOD_RES (36)..(36): Any amino acid other than Pro

SEQ ID NO: 153 - protein, 773 aa, Artificial Sequence
  source: /note="Description of Artificial Sequence: Synthetic polypeptide"
  MOD_RES (36)..(36): Any amino acid other than Pro
  VARIANT (761)..(761): /replace="Asn" or "His" or "Ser" or "Thr" or "Tyr" or "Cys" or "Met" or "Trp" or "Ala" or "Ile" or "Leu" or "Phe" or "Val" or "Pro" or "Gly"
  MISC_FEATURE (1)..(773): /note="Variant residues given in the sequence have no preference with respect to those in the annotations for variant positions"
MILDTDYITEDGKPVIRIFKKENGEFKIDYDRNFEXYIYALLKDDSAIEDVKKITAERHGTTVRVVRAEKVKKKFLGRPIEVWKLYFTHPQDVPAIRDKIKEHPAVVDIYEYDIPFAKRYLIDKGLIPMEGDEELKMLAFDIETLYHEGEEFAEGPILMISYADEEGARVITWKNIDLPYVDVVSTEKEMIKRFLKVVKEKDPDVLITYNGDNFDFAYLKKRSEKLGVKFILGREGSEPKIQRMGDRFAVEVKGRIHFDLYPVIRRTINLPTYTLEAVYEAIFGQPKEKVYAEEIAQAWETGEGLERVARYSMEDAKVTYELGKEFFPMEAQLSRLVGQSLWDVSRSSTGNLVEWFLLRKAYERNELAPNKPDERELARRRESYAGGYVKEPERGLWENIVYLDFRSLYPSIIITHNVSPDTLNREGCEEYDVAPQVGHKFCKDFPGFIPSLLGDLLEERQKVKKKMKATIDPIEKKLLDYRQRAIKILANSFYGYYGYAKARWYCKECAESVTAWGRQYIETTIREIEEKFGFKVLYADTDGFFATIPGADAETVKKKAKEFLDYINAKLPGLLELEYEGFYKRGFFVTKKKYAVIDEEDKITTRGLEIVRRDWSEIAKETQARVLEAILKHGDVEEAVRIVKEVTEKLSKYEVPPEKLVIYEQITRDLKDYKATGPHVAVAKRLAARGIKIRPGTVISYIVLKGSGRIGDRAIPFDEFDPAKHKYDAEYYIENQVLPAVERILRAFGYRKEDLRYQKTQQVGLGAWLKPKT

SEQ ID NO: 154 - protein, 773 aa, Artificial Sequence; identical to SEQ ID NO: 153
  source: /note="Description of Artificial Sequence: Synthetic polypeptide"
  MOD_RES (36)..(36): Any amino acid other than Pro

SEQ ID NO: 155 - protein, 774 aa, Artificial Sequence
  source: /note="Description of Artificial Sequence: Synthetic polypeptide"
  MOD_RES (36)..(36): Any amino acid other than Pro
  VARIANT (761)..(761): /replace="Asn" or "His" or "Ser" or "Thr" or "Tyr" or "Cys" or "Met" or "Trp" or "Ala" or "Ile" or "Leu" or "Phe" or "Val" or "Pro" or "Gly"
  MISC_FEATURE (1)..(774): /note="Variant residues given in the sequence have no preference with respect to those in the annotations for variant positions"
MILDTDYITEDGKPVIRIFKKENGEFKIEYDRTFEXYFYALLKDDSAIEEVKKITAERHGTVVTVKRVEKVQKKFLGRPVEVWKLYFTHPQDVPAIRDKIREHPAVIDIYEYDIPFAKRYLIDKGLVPMEGDEELKMLAFDIETLYHEGEEFAEGPILMISYADEEGARVITWKNVDLPYVDVVSTEREMIKRFLRVVKEKDPDVLITYNGDNFDFAYLKKRCEKLGINFALGRDGSEPKIQRMGDRFAVEVKGRIHFDLYPVIRRTINLPTYTLEAVYEAVFGQPKEKVYAEEITTAWETGENLERVARYSMEDAKVTYELGKEFLPMEAQLSRLIGQSLWDVSRSSTGNLVEWFLLRKAYERNELAPNKPDEKELARRRQSYEGGYVKEPERGLWENIVYLDFRSLYPSIIITHNVSPDTLNREGCKEYDVAPQVGHRFCKDFPGFIPSLLGDLLEERQKIKKKMKATIDPIERKLLDYRQRAIKILANSYYGYYGYARARWYCKECAESVTAWGREYITMTIKEIEEKYGFKVIYSDTDGFFATIPGADAETVKKKAMEFLKYINAKLPGALELEYEGFYKRGFFVTKKKYAVIDEEGKITTRGLEIVRRDWSEIAKETQARVLEALLKDGDVEKAVRIVKEVTEKLSKYEVPPEKLVIHEQITRDLKDYKATGPHVAVAKRLAARGVKIRPGTVISYIVLKGSGRIGDRAIPFDEFDPTKHKYDAEYYIENQVLPAVERILRAFGYRKEDLRYQKTQQVGLSAWLKPKGT

SEQ ID NO: 156 - protein, 774 aa, Artificial Sequence; identical to SEQ ID NO: 155
  source: /note="Description of Artificial Sequence: Synthetic polypeptide"
  MOD_RES (36)..(36): Any amino acid other than Pro

SEQ ID NO: 157 - protein, 775 aa, Artificial Sequence
  source: /note="Description of Artificial Sequence: Synthetic polypeptide"
  MOD_RES (36)..(36): Any amino acid other than Pro
  VARIANT (761)..(761): /replace="Asn" or "His" or "Ser" or "Thr" or "Tyr" or "Cys" or "Met" or "Trp" or "Ala" or "Ile" or "Leu" or "Phe" or "Val" or "Pro" or "Gly"
  MISC_FEATURE (1)..(775): /note="Variant residues given in the sequence have no preference with respect to those in the annotations for variant positions"
MILDTDYITENGKPVIRVFKKENGEFKIEYDRTFEXYFYALLKDDSAIEDVKKVTAKRHGTVVKVKRAEKVQKKFLGRPIEVWKLYFNHPQDVPAIRDRIRAHPAVVDIYEYDIPFAKRYLIDKGLIPMEGDEELTMLAFDIETLYHEGEEFGTGPILMISYADGSEARVITWKKIDLPYVDVVSTEKEMIKRFLRVVREKDPDVLITYNGDNFDFAYLKKRCEELGIKFTLGRDGSEPKIQRMGDRFAVEVKGRIHFDLYPVIRRTINLPTYTLEAVYEAVFGKPKEKVYAEEIAQAWESGEGLERVARYSMEDAKVTYELGREFFPMEAQLSRLIGQSLWDVSRSSTGNLVEWFLLRKAYKRNELAPNKPDERELARRRGGYAGGYVKEPERGLWDNIVYLDFRSLYPSIIITHNVSPDTLNREGCKEYDVAPEVGHKFCKDFPGFIPSLLGDLLEERQKIKRKMKATVDPLEKKLLDYRQRAIKILANSFYGYYGYAKARWYCKECAESVTAWGREYIEMVIRELEEKFGFKVLYADTDGLHATIPGADAETVKKKAKEFLKYINPKLPGLLELEYEGFYVRGFFVTKKKYAVIDEEGKITTRGLEIVRRDWSEIAKETQARVLEAILKHGDVEEAVRIVKEVTEKLSKYEVPPEKLVIHEQITRDLRDYKATGPHVAVAKRLAARGVKIRPGTVISYIVLKGSGRIGDRAIPADEFDPTKHRYDAEYYIENQVLPAVERILKAFGYRKEDLRYQKTQQVGLGAWLKVKGKK

SEQ ID NO: 158 - protein, 775 aa, Artificial Sequence; identical to SEQ ID NO: 157
  source: /note="Description of Artificial Sequence: Synthetic polypeptide"
  MOD_RES (36)..(36): Any amino acid other than Pro

SEQ ID NO: 159 - protein, 783 aa, Artificial Sequence
  source: /note="Description of Artificial Sequence: Synthetic polypeptide"
  MOD_RES (40)..(40): Any amino acid other than Pro
MRFWPLDATYSVVGGVPEVRVFGVDGEGRRVVLVDRRFRXYFYAKCDKCDASLAKSYLSRVAPVEAVEVVERRFFGRPTIFLKVVAKVPEDVRKLREAALGAPGVVDVYEADIRYYMRYMIDKGVVPCAWNVVEAREAGKLGPLPLYEVVEWAGVEEGFPPPLRVLAFDIEVYNERGSPDPLRDPVVMLAVKTSDGREEVFEAEGRDDRRVIRGFVDFVKEFDPDVIVGYNSNGFDWPYLSERAKALGVPLRVDRLGGVPQQSVYGHWSVVGRANVDLYNIVDEFPEIKVKTLDRVAEYFGVMKRSERVLIPGHKVYEYWNDPAKRPTLMRYVLDDVRSTLGLAEKLLPFLIQLSSVSGLPLDQVAAASVGNRVEWMLLRYAYRMGEVAPNREEREYEPYKGAIVLEPKPGLYSDVLVLDFSSMYPNIMMKYNLSPDTYLEPHEPDPPEGVVVAPEVGHRFRKAPTGFIPAVLKHLVELRRAVREEAKKYPPDSPEYRLLDERQRALKVMANAMYGYLGWVGARWYKKEVAESVTAFARAILLDVVEYAKRLGIEVIYGDTDSLFVKKSGAVDRLVKYVEERHGIEIKVDKDYERVLFTEAKKRYAGLLRDGRIDIVGFEVVRGDWCELAKEVQLNVVELILKSKSVGEARERVVKYVREVVERLKAYKFDLDDLIIWKTLDKELDEYKAYGPHVHAALELKRRGYKVGKGTTVGYVIVRGPGKVSERAMPYIFVDDASKVDVDYYIEKQVIPAALRIAEVLGVKESDLKTGRVQKSLLDFLG

SEQ ID NO: 160 - protein, 785 aa, Artificial Sequence
  source: /note="Description of Artificial Sequence: Synthetic polypeptide"
  MOD_RES (42)..(42): Any amino acid other than Pro
MKFKLWPLDATYSVVGGVPEVRIFGISESGDRVVVVDRRFRXYFYADCPACDPESVRSQLGRVAPVEEVVAVERRYLGRPRSFLKIVARVPEDVRKLREAAAALPGVSGVYEADIRFYMRYMLDMGVVPCSWNTVDAEATGEKLGNLPVYKVAEWGGVTEGFPPPLRVLAFDIEVYNERGTPDPLRDPVILLAVQASDGRVEVFEASGRDDRSVLRSFIDFVREFDPDVIVGYNSNQFDWPYLAERARALGIPLKVDRVGGAPQQSVYGHWSVTGRANVDLYNIVDEFPEIKLKTLDRVAEYFGVMKREERVLVPGHKIYEYWRDQGKRPLLRQYVIDDVKSTYGLAEKLLPFLIQLSSVSGLPLDQVAAASVGNRVEWMLLRYAYRLGEVAPNREEREYEPYKGAIVLEPRPGLYSDVLALDFSSMYPNIMMKYNLSPDTYLERGEPDPPGGVYVAPEVGHRFRREPPGFIPLVLRQLIELRKRVREELKKYPPDSPEYRVLDERQRALKIMANAMYGYTGWVGARWYKKEVAESVTAFARAILKDVIEYARKAGIVVIYGDTDSLFVKKSGDVEKLVKYVEEKYGIDIKIDKDYSTVLFTEAKKRYAGLLRDGRIDIVGFEVVRGDWSELAKEVQLRVIELILTSRDVSEARQKVVKYVRGVIDKLRNYEVDLDDLIIWKTLDKELDEYKAYPPHVHAAILLKKRGYKVGKGTTIGYVVVKGGEKVSERAVPYIFIDDIEKIDLDYYVERQVIPAALRIAEVIGIKEGDLKTGRSQRTLLDFF

SEQ ID NO: 161 - protein, 766 aa, Artificial Sequence
  source: /note="Description of Artificial Sequence: Synthetic polypeptide"
  MOD_RES (36)..(36): Any amino acid other than Pro
MILDADYITEEGKPVIRLFKKENGEFKIEHDRTFRXYIYALLKDDSKIEEVKKITAERHGKIVRIVDAEKVEKKFLGRPITVWRLYFEHPQDVPTIREKIREHSAVVDIFEYDIPFAKRYLIDKGLIPMEGDEELKLLAFDIETLYHEGEEFGKGPIIMISYADEEEAKVITWKKIDLPYVEVVSSEREMIKRFLKIIREKDPDIIITYNGDSFDLPYLAKRAEKLGIKLTIGRDGSEPKMQRIGDMTAVEVKGRIHFDLYHVIRRTINLPTYTLEAVYEAIFGKPKEKVYADEIAKAWETGEGLERVAKYSMEDAKATYELGKEFFPMEAQLSRLVGQPLWDVSRSSTGNLVEWFLLRKAYERNELAPNKPDEREYERRLRESYAGGFVKEPEKGLWENIVSLDFRALYPSIIITHNVSPDTLNREGCRNYDVAPEVGHKFCKDFPGFIPSLLKRLLDERQKIKTKMKASQDPIEKIMLDYRQRAIKILANSYYGYYGYAKARWYCKECAESVTAWGREYIEFVWKELEEKFGFKVLYIDTDGLYATIPGGKSEEIKKKALEFVDYINAKLPGLLELEYEGFYKRGFFVTKKKYALIDEEGKIITRGLEIVRRDWSEIAKETQARVLEAILKHGNVEEAVRIVKEVTQKLSKYEIPPEKLAIYEQITRPLHEYKAIGPHVAVAKRLAAKGVKIKPGMVIGYIVLRGDGPISNRAILAEEYDPRKHKYDAEYYIENQVLPAVLRILEGFGYRKEDLRWQKTKQTGL

SEQ ID NO: 162 - protein, 131 aa, Artificial Sequence
  source: /note="Description of Artificial Sequence: Synthetic polypeptide"
  MOD_RES (36)..(36): Any amino acid other than Pro
MILDADYITEEGKPVIRLFKKENGEFKIEHDRTFRXYIYALLKDDSKIEEVKKITAERHGKIVRIVDAEKVEKKFLGRPITVWRLYFEHPQDVPTIREKIREHSAVVDIFEYDIPFAKRYLIDKGLIPMEG

SEQ ID NO: 163 - protein, 131 aa, Artificial Sequence
  source: /note="Description of Artificial Sequence: Synthetic polypeptide"
  MOD_RES (36)..(36): Any amino acid other than Pro
MILDVDYITEEGKPVIRLFKKENGKFKIEHDRTFRXYIYALLRDDSKIEEVKKITGERHGKIVRIVDVEKVEKKFLGKPITVWKLYLEHPQDVPTIREKVREHPAVVDIFEYDIPFAKRYLIDKGLIPMEG

SEQ ID NO: 164 - protein, 131 aa, Artificial Sequence
  source: /note="Description of Artificial Sequence: Synthetic polypeptide"
  MOD_RES (36)..(36): Any amino acid other than Pro
MILDADYITEDGKPIIRIFKKENGEFKVEYDRNFRXYIYALLKDDSQIDEVRKITAERHGKIVRIIDAEKVRKKFLGRPIEVWRLYFEHPQDVPAIRDKIREHSAVIDIFEYDIPFAKRYLIDKGLIPMEG

SEQ ID NO: 165 - protein, 131 aa, Artificial Sequence
  source: /note="Description of Artificial Sequence: Synthetic polypeptide"
  MOD_RES (36)..(36): Any amino acid other than Pro
MILDTDYITKDGKPIIRIFKKENGEFKIELDPHFQXYIYALLKDDSAIEEIKAIKGERHGKTVRVLDAVKVRKKFLGREVEVWKLIFEHPQDVPAMRGKIREHPAVVDIYEYDIPFAKRYLIDKGLIPMEG

SEQ ID NO: 166 - protein, 131 aa, Artificial Sequence
  source: /note="Description of Artificial Sequence: Synthetic polypeptide"
  MOD_RES (36)..(36): Any amino acid other than Pro
MILDTDYITEDGKPVIRIFKKENGEFKIDYDRNFEXYIYALLKDDSAIEDVKKITAERHGTTVRVVRAEKVKKKFLGRPIEVWKLYFTHPQDVPAIRDKIKEHPAVVDIYEYDIPFAKRYLIDKGLIPMEG

SEQ ID NO: 167 - protein, 131 aa, Artificial Sequence
  source: /note="Description of Artificial Sequence: Synthetic polypeptide"
  MOD_RES (36)..(36): Any amino acid other than Pro
MILDTDYITEDGKPVIRIFKKENGEFKIEYDRTFEXYFYALLKDDSAIEEVKKITAERHGTVVTVKRVEKVQKKFLGRPVEVWKLYFTHPQDVPAIRDKIREHPAVIDIYEYDIPFAKRYLIDKGLVPMEG

SEQ ID NO: 168 - protein, 131 aa, Artificial Sequence
  source: /note="Description of Artificial Sequence: Synthetic polypeptide"
  MOD_RES (36)..(36): Any amino acid other than Pro
MILDTDYITENGKPVIRVFKKENGEFKIEYDRTFEXYFYALLKDDSAIEDVKKVTAKRHGTVVKVKRAEKVQKKFLGRPIEVWKLYFNHPQDVPAIRDRIRAHPAVVDIYEYDIPFAKRYLIDKGLIPMEG

SEQ ID NO: 169 - protein, 844 aa, Artificial Sequence
  source: /note="Description of Artificial Sequence: Synthetic polypeptide"
MILDADYITEEGKPVIRLFKKENGEFKIEHDRTFRHYIYALLKDDSKIEEVKKITAERHGKIVRIVDAEKVEKKFLGRPITVWRLYFEHPQDVPTIREKIREHSAVVDIFEYDIPFAKRYLIDKGLIPMEGDEELKLLAFDIETLYHEGEEFGKGPIIMISYADEEEAKVITWKKIDLPYVEVVSSEREMIKRFLKIIREKDPDIIITYNGDSFDLPYLAKRAEKLGIKLTIGRDGSEPKMQRIGDMTAVEVKGRIHFDLYHVIRRTINLPTYTLEAVYEAIFGKPKEKVYADEIAKAWETGEGLERVAKYSMEDAKATYELGKEFFPMEAQLSRLVGQPLWDVSRSSTGNLVEWFLLRKAYERNELAPNKPDEREYERRLRESYAGGFVKEPEKGLWENIVSLDFRALYPSIIITHNVSPDTLNREGCRNYDVAPEVGHKFCKDFPGFIPSLLKRLLDERQKIKTKMKASQDPIEKIMLDYRQRAIKILANSYYGYYGYAKARWYCKECAESVTAWGREYIEFVWKELEEKFGFKVLYIDTDGLYATIPGGKSEEIKKKALEFVDYINAKLPGLLELEYEGFYKRGFFVTKKKYALIDEEGKIITRGLEIVRRDWSEIAKETQARVLEAILKHGNVEEAVRIVKEVTQKLSKYEIPPEKLAIYEQITRPLHEYKAIGPHVAVAKRLAAKGVKIKPGMVIGYIVLRGDGPISNRAILAEEYDPRKHKYDAEYYIENQVLPAVLRILEGFGYRKEDLRWQKTKQTGLTSWLNIKKSGTGGGGATVKFKYKGEEKEVDISKIKKVWRVGKMISFTYDEGGGKTGRGAVSEKDAPKELLQMLEKQKK

SEQ ID NO: 170 - DNA, 20 bp, Artificial Sequence
  source: /note="Description of Artificial Sequence: Synthetic primer"
ccaacatggcgaaatgctgt

SEQ ID NO: 171 - DNA, 20 bp, Artificial Sequence
  source: /note="Description of Artificial Sequence: Synthetic primer"
catcaacaacacggtcagcc

SEQ ID NO: 172 - DNA, 20 bp, Artificial Sequence
  source: /note="Description of Artificial Sequence: Synthetic primer"
cccacagttggtaggcatca

SEQ ID NO: 173 - DNA, 20 bp, Artificial Sequence
  source: /note="Description of Artificial Sequence: Synthetic primer"
ttgctcagcaacaagttggc

SEQ ID NO: 174 - DNA, 20 bp, Artificial Sequence
  source: /note="Description of Artificial Sequence: Synthetic primer"
tcatgttggacggatggctg

SEQ ID NO: 175 - DNA, 20 bp, Artificial Sequence
  source: /note="Description of Artificial Sequence: Synthetic primer"
cgggctgtcttcatcacctc

SEQ ID NO: 176 - DNA, 21 bp, Artificial Sequence
  source: /note="Description of Artificial Sequence: Synthetic primer"
accatgtgagacgctaatcca

SEQ ID NO: 177 - protein, 5 aa, Artificial Sequence
  source: /note="Description of Artificial Sequence: Synthetic peptide"
RHYIY

SEQ ID NO: 178 - protein, 5 aa, Artificial Sequence
  source: /note="Description of Artificial Sequence: Synthetic peptide"
QHYIY

SEQ ID NO: 179 - protein, 5 aa, Artificial Sequence
  source: /note="Description of Artificial Sequence: Synthetic peptide"
EHYIY

SEQ ID NO: 180 - protein, 5 aa, Artificial Sequence
  source: /note="Description of Artificial Sequence: Synthetic peptide"
EHYFY

SEQ ID NO: 181 - protein, 5 aa, Artificial Sequence
  source: /note="Description of Artificial Sequence: Synthetic peptide"
RHYFY

SEQ ID NO: 182 - protein, 5 aa, Artificial Sequence
  source: /note="Description of Artificial Sequence: Synthetic peptide"
  MOD_RES (5)..(5): Any neutral amino acid
  source: /note="See specification as filed for detailed description of substitutions and preferred embodiments"
WQKTX

SEQ ID NO: 183 - protein, 5 aa, Artificial Sequence
  source: /note="Description of Artificial Sequence: Synthetic peptide"
  MOD_RES (1)..(1): Any neutral amino acid
  source: /note="See specification as filed for detailed description of substitutions and preferred embodiments"
XQTGL

SEQ ID NO: 184 - protein, 5 aa, Artificial Sequence
  source: /note="Description of Artificial Sequence: Synthetic peptide"
  MOD_RES (3)..(3): Any neutral amino acid
  source: /note="See specification as filed for detailed description of substitutions and preferred embodiments"
KTXQT

SEQ ID NO: 185 - protein, 5 aa, Artificial Sequence
  source: /note="Description of Artificial Sequence: Synthetic peptide"
  MOD_RES (5)..(5): Any neutral amino acid
  source: /note="See specification as filed for detailed description of substitutions and preferred embodiments"
YQKTX

SEQ ID NO: 186 - protein, 5 aa, Artificial Sequence
  source: /note="Description of Artificial Sequence: Synthetic peptide"
  MOD_RES (1)..(1): Any neutral amino acid
  source: /note="See specification as filed for detailed description of substitutions and preferred embodiments"
XQVGL

SEQ ID NO: 187 - protein, 5 aa, Artificial Sequence
  source: /note="Description of Artificial Sequence: Synthetic peptide"
  MOD_RES (3)..(3): Any neutral amino acid
  source: /note="See specification as filed for detailed description of substitutions and preferred embodiments"
KTXQV

SEQ ID NO: 188 - protein, 5 aa, Artificial Sequence
  source: /note="Description of Artificial Sequence: Synthetic peptide"
  MOD_RES (5)..(5): Any neutral amino acid
  source: /note="See specification as filed for detailed description of substitutions and preferred embodiments"
YQSSX

SEQ ID NO: 189 - protein, 5 aa, Artificial Sequence
  source: /note="Description of Artificial Sequence: Synthetic peptide"
  MOD_RES (3)..(3): Any neutral amino acid
  source: /note="See specification as filed for detailed description of substitutions and preferred embodiments"
SSXQT

SEQ ID NO: 190 - protein, 5 aa, Artificial Sequence
  source: /note="Description of Artificial Sequence: Synthetic peptide"
  MOD_RES (5)..(5): Any neutral amino acid
  source: /note="See specification as filed for detailed description of substitutions and preferred embodiments"
TGRVX

SEQ ID NO: 191 - protein, 5 aa, Artificial Sequence
  source: /note="Description of Artificial Sequence: Synthetic peptide"
  MOD_RES (1)..(1): Any neutral amino acid
  source: /note="See specification as filed for detailed description of substitutions and preferred embodiments"
XKSLL

SEQ ID NO: 192 - protein, 5 aa, Artificial Sequence
  source: /note="Description of Artificial Sequence: Synthetic peptide"
  MOD_RES (3)..(3): Any neutral amino acid
  source: /note="See specification as filed for detailed description of substitutions and preferred embodiments"
RVXKS

SEQ ID NO: 193 - protein, 5 aa, Artificial Sequence
  source: /note="Description of Artificial Sequence: Synthetic peptide"
  MOD_RES (5)..(5): Any neutral amino acid
  source: /note="See specification as filed for detailed description of substitutions and preferred embodiments"
TGRSX

SEQ ID NO: 194 - protein, 5 aa, Artificial Sequence
  source: /note="Description of Artificial Sequence: Synthetic peptide"
  MOD_RES (1)..(1): Any neutral amino acid
  source: /note="See specification as filed for detailed description of substitutions and preferred embodiments"
XRTLL

SEQ ID NO: 195 - protein, 5 aa, Artificial Sequence
  source: /note="Description of Artificial Sequence: Synthetic peptide"
  MOD_RES (3)..(3): Any neutral amino acid
  source: /note="See specification as filed for detailed description of substitutions and preferred embodiments"
RSXRT

SEQ ID NO: 196 - protein, 5 aa, Artificial Sequence
  source: /note="Description of Artificial Sequence: Synthetic peptide"
  source: /note="See specification as filed for detailed description of substitutions and preferred embodiments"
LDFRS

SEQ ID NO: 197 - protein, 5 aa, Artificial Sequence
  source: /note="Description of Artificial Sequence: Synthetic peptide"
  source: /note="See specification as filed for detailed description of substitutions and preferred embodiments"
FRSLY

SEQ ID NO: 198 - protein, 5 aa, Artificial Sequence
  source: /note="Description of Artificial Sequence: Synthetic peptide"
  source: /note="See specification as filed for detailed description of substitutions and preferred embodiments"
SLYPS

SEQ ID NO: 199 - protein, 5 aa, Artificial Sequence
  source: /note="Description of Artificial Sequence: Synthetic peptide"
  MOD_RES (2)..(2): Any amino acid other than Pro
  source: /note="See specification as filed for detailed description of substitutions and preferred embodiments"
RXYIY

SEQ ID NO: 200 - protein, 5 aa, Artificial Sequence
  source: /note="Description of Artificial Sequence: Synthetic peptide"
  MOD_RES (2)..(2): Any amino acid other than Pro
  source: /note="See specification as filed for detailed description of substitutions and preferred embodiments"
QXYIY

SEQ ID NO: 201 - protein, 5 aa, Artificial Sequence
  source: /note="Description of Artificial Sequence: Synthetic peptide"
  MOD_RES (2)..(2): Any amino acid other than Pro
  source: /note="See specification as filed for detailed description of substitutions and preferred embodiments"
EXYIY

SEQ ID NO: 202 - protein, 5 aa, Artificial Sequence
  source: /note="Description of Artificial Sequence: Synthetic peptide"
  MOD_RES (2)..(2): Any amino acid other than Pro
  source: /note="See specification as filed for detailed description of substitutions and preferred embodiments"
EXYFY

SEQ ID NO: 203 - protein, 5 aa, Artificial Sequence
  source: /note="Description of Artificial Sequence: Synthetic peptide"
  MOD_RES (2)..(2): Any amino acid other than Pro
  source: /note="See specification as filed for detailed description of substitutions and preferred embodiments"
RXYFY

SEQ ID NO: 204 - protein, 5 aa, Artificial Sequence
  source: /note="Description of Artificial Sequence: Synthetic peptide"
  MOD_RES (5)..(5): Any neutral amino acid
  source: /note="See specification as filed for detailed description of substitutions and preferred embodiments"
WQKTX

SEQ ID NO: 205 - protein, 5 aa, Artificial Sequence
  source: /note="Description of Artificial Sequence: Synthetic peptide"
  MOD_RES (5)..(5): Any neutral amino acid
  source: /note="See specification as filed for detailed description of substitutions and preferred embodiments"
YQKTX

SEQ ID NO: 206 - protein, 5 aa, Artificial Sequence
  source: /note="Description of Artificial Sequence: Synthetic peptide"
  MOD_RES (1)..(1): Any neutral amino acid
  source: /note="See specification as filed for detailed description of substitutions and preferred embodiments"
XQTGL

SEQ ID NO: 207 - protein, 5 aa, Artificial Sequence
  source: /note="Description of Artificial Sequence: Synthetic peptide"
  MOD_RES (1)..(1): Any neutral amino acid
  source: /note="See specification as filed for detailed description of substitutions and preferred embodiments"
XQVGL

SEQ ID NO: 208 - protein, 5 aa, Artificial Sequence
  source: /note="Description of Artificial Sequence: Synthetic peptide"
  MOD_RES (3)..(3): Any neutral amino acid
  source: /note="See specification as filed for detailed description of substitutions and preferred embodiments"
KTXQT

SEQ ID NO: 209 - protein, 5 aa, Artificial Sequence
  source: /note="Description of Artificial Sequence: Synthetic peptide"
  MOD_RES (3)..(3): Any neutral amino acid
  source: /note="See specification as filed for detailed description of substitutions and preferred embodiments"
KTXQV

SEQ ID NO: 210 - protein, 5 aa, Artificial Sequence
  source: /note="Description of Artificial Sequence: Synthetic peptide"
  MOD_RES (5)..(5): Any neutral amino acid
  source: /note="See specification as filed for detailed description of substitutions and preferred embodiments"
YQSSX

SEQ ID NO: 211 - protein, 5 aa, Artificial Sequence
  source: /note="Description of Artificial Sequence: Synthetic peptide"
  MOD_RES (3)..(3): Any neutral amino acid
  source: /note="See specification as filed for detailed description of substitutions and preferred embodiments"
SSXQT

SEQ ID NO: 212 - protein, 5 aa, Artificial Sequence
  source: /note="Description of Artificial Sequence: Synthetic peptide"
  MOD_RES (5)..(5): Any neutral amino acid
  source: /note="See specification as filed for detailed description of substitutions and preferred embodiments"
TGRVX

SEQ ID NO: 213 - protein, 5 aa, Artificial Sequence
  source: /note="Description of Artificial Sequence: Synthetic peptide"
  MOD_RES (1)..(1): Any neutral amino acid
  source: /note="See specification as filed for detailed description of substitutions and preferred embodiments"
XKSLL

SEQ ID NO: 214 - protein, 5 aa, Artificial Sequence
  source: /note="Description of Artificial Sequence: Synthetic peptide"
  MOD_RES (3)..(3): Any neutral amino acid
  source: /note="See specification as filed for detailed description of substitutions and preferred embodiments"
RVXKS

SEQ ID NO: 215 - protein, 5 aa, Artificial Sequence
  source: /note="Description of Artificial Sequence: Synthetic peptide"
  MOD_RES (5)..(5): Any neutral amino acid
  source: /note="See specification as filed for detailed description of substitutions and preferred embodiments"
TGRSX

SEQ ID NO: 216 - protein, 5 aa, Artificial Sequence
  source: /note="Description of Artificial Sequence: Synthetic peptide"
  MOD_RES (1)..(1): Any neutral amino acid
  source: /note="See specification as filed for detailed description of substitutions and preferred embodiments"
XRTLL

SEQ ID NO: 217 - protein, 5 aa, Artificial Sequence
  source: /note="Description of Artificial Sequence: Synthetic peptide"
  MOD_RES (3)..(3): Any neutral amino acid
  source: /note="See specification as filed for detailed description of substitutions and preferred embodiments"
RSXRT

SEQ ID NO: 218 - protein, 10 aa, Artificial Sequence
  source: /note="Description of Artificial Sequence: Synthetic His tag"
  MISC_FEATURE (1)..(10): /note="This sequence may encompass 1-10 residues"
HHHHHHHHHH
